United States Patent Application Publication US 2022/0267777 A1 - sequence listing, part 2

SEQ ID NO: 31241 - RNA, 22 nt, Artificial Sequence
  RPE65 RNA guide
uuuauuagaggaauguugguuc

SEQ ID NO: 31242 - RNA, 22 nt, Artificial Sequence
  RPE65 RNA guide
uuuauuucucuaaugcagaaaa

SEQ ID NO: 31243 - RNA, 22 nt, Artificial Sequence
  RPE65 RNA guide
uuucacugucugugaauccucu

SEQ ID NO: 31244 - RNA, 22 nt, Artificial Sequence
  RPE65 RNA guide
uuucaugcccauuuuauuagag

SEQ ID NO: 31245 - RNA, 22 nt, Artificial Sequence
  RPE65 RNA guide
uuucauucgccuuuacuuuauu

SEQ ID NO: 31246 - RNA, 22 nt, Artificial Sequence
  RPE65 RNA guide
uuucucuaaugcagaaaaacgc

SEQ ID NO: 31247 - RNA, 22 nt, Artificial Sequence
  RPE65 RNA guide
uuugaagaugacaaagguguaa

SEQ ID NO: 31248 - RNA, 22 nt, Artificial Sequence
  RPE65 RNA guide
uuugggcuuuuuauagcaagaa

SEQ ID NO: 31249 - RNA, 22 nt, Artificial Sequence
  RPE65 RNA guide
uuugucaucuucaaacugucag

SEQ ID NO: 31250 - RNA, 22 nt, Artificial Sequence
  RPE65 RNA guide
uuuuaugucagucucucuucuc

SEQ ID NO: 31251 - RNA, 22 nt, Artificial Sequence
  RPE65 RNA guide
uuuuauuagaggaauguugguu

SEQ ID NO: 31252 - RNA, 20 nt, Artificial Sequence
  RPE65 RNA guide
aaaaaacaggaauccuggcu

SEQ ID NO: 31253 - RNA, 20 nt, Artificial Sequence
  RPE65 RNA guide
aaaaacaggaauccuggcuc

SEQ ID NO: 31254 - RNA, 20 nt, Artificial Sequence
  RPE65 RNA guide
aaaaaugagauggcaaaagg

SEQ ID NO: 31255 - RNA, 20 nt, Artificial Sequence
  RPE65 RNA guide
aaaacaggaauccuggcucu

SEQ ID NO: 31256 - RNA, 20 nt, Artificial Sequence
  RPE65 RNA guide
aaaaggcaaauggauuggug

SEQ ID NO: 31257 - RNA, 20 nt, Artificial Sequence
  RPE65 RNA guide
aaaaucacugccagcucuau

SEQ ID NO: 31258 - RNA, 20 nt, Artificial Sequence
  RPE65 RNA guide
aaaaugagauggcaaaaggc

SEQ ID NO: 31259 - RNA, 20 nt, Artificial Sequence
  RPE65 RNA guide
aaaaugucugcugacuugac

SEQ ID NO: 31260 - RNA, 20 nt, Artificial Sequence
  RPE65 RNA guide
aaacaccaauccauuugccu

SEQ ID NO: 31261 - RNA, 20 nt, Artificial Sequence
  RPE65 RNA guide
aaacaggaauccuggcucuu

SEQ ID NO: 31262 - RNA, 20 nt, Artificial Sequence
  RPE65 RNA guide
aaagagccaggauuccuguu

SEQ ID NO: 31263 - RNA, 20 nt, Artificial Sequence
  RPE65 RNA guide
aaaggcaaauggauuggugu

SEQ ID NO: 31264 - RNA, 20 nt, Artificial Sequence
  RPE65 RNA guide
aaaggguuggaaggagugag

SEQ ID NO: 31265 - RNA, 20 nt, Artificial Sequence
  RPE65 RNA guide
aaaucacugccagcucuaug

SEQ ID NO: 31266 - RNA, 20 nt, Artificial Sequence
  RPE65 RNA guide
aaaucuauuagguggagagu

SEQ ID NO: 31267 - RNA, 20 nt, Artificial Sequence
  RPE65 RNA guide
aaaugaaaaaacaggaaucc

SEQ ID NO: 31268 - RNA, 20 nt, Artificial Sequence
  RPE65 RNA guide
aaaugaaaaucacugccagc

SEQ ID NO: 31269 - RNA, 20 nt, Artificial Sequence
  RPE65 RNA guide
aaaugagauggcaaaaggca

SEQ ID NO: 31270 - RNA, 20 nt, Artificial Sequence
  RPE65 RNA guide
aaauggauugguguuugggg

SEQ ID NO: 31271 - RNA, 20 nt, Artificial Sequence
  RPE65 RNA guide
aaaugucugcugacuugacu

SEQ ID NO: 31272 - RNA, 20 nt, Artificial Sequence
  RPE65 RNA guide
aacaccaauccauuugccuu

SEQ ID NO: 31273 - RNA, 20 nt, Artificial Sequence
  RPE65 RNA guide
aacaggaauccuggcucuuu

SEQ ID NO: 31274 - RNA, 20 nt, Artificial Sequence
  RPE65 RNA guide
aacauugcuucuuaucccug

SEQ ID NO: 31275 - RNA, 20 nt, Artificial Sequence
  RPE65 RNA guide
aacccuuuauccacacucug

SEQ ID NO: 31276 - RNA, 20 nt, Artificial Sequence
  RPE65 RNA guide
aagaagcaauguucugucuc

SEQ ID NO: 31277 - RNA, 20 nt, Artificial Sequence
  RPE65 RNA guide
aagaagcugcccaaucaggc

SEQ ID NO: 31278 - RNA, 20 nt, Artificial Sequence
  RPE65 RNA guide
aagagccaggauuccuguuu

SEQ ID NO: 31279 - RNA, 20 nt, Artificial Sequence
  RPE65 RNA guide
aagaugcuucucccucacuc

SEQ ID NO: 31280 - RNA, 20 nt, Artificial Sequence
  RPE65 RNA guide
aagcaauguucugucucccc

SEQ ID NO: 31281 - RNA, 20 nt, Artificial Sequence
  RPE65 RNA guide
aagcaucuugagaggauugg

SEQ ID NO: 31282 - RNA, 20 nt, Artificial Sequence
  RPE65 RNA guide
aagccuagcccaaggcaggg

SEQ ID NO: 31283 - RNA, 20 nt, Artificial Sequence
  RPE65 RNA guide
aagcugcccaaucaggcugc

SEQ ID NO: 31284 - RNA, 20 nt, Artificial Sequence
  RPE65 RNA guide
aaggacaagccuagcccaag

SEQ ID NO: 31285 - RNA, 20 nt, Artificial Sequence
  RPE65 RNA guide
aaggagugagggagaagcau

SEQ ID NO: 31286 - RNA, 20 nt, Artificial Sequence
  RPE65 RNA guide
aaggcaaauggauugguguu

SEQ ID NO: 31287 - RNA, 20 nt, Artificial Sequence
  RPE65 RNA guide
aaggcagaguauaucagcag

SEQ ID NO: 31288 - RNA, 20 nt, Artificial Sequence
  RPE65 RNA guide
aaggcagggauaagaagcaa

SEQ ID NO: 31289 - RNA, 20 nt, Artificial Sequence
  RPE65 RNA guide
aaggggagacagaacauugc

SEQ ID NO: 31290 - RNA, 20 nt, Artificial Sequence
  RPE65 RNA guide
aaggguuggaaggagugagg

SEQ ID NO: 31291 - RNA, 20 nt, Artificial Sequence
  RPE65 RNA guide
aaggugagucaagucagcag

SEQ ID NO: 31292 - RNA, 20 nt, Artificial Sequence
  RPE65 RNA guide
aaggugugaucuccuaguga

SEQ ID NO: 31293 - RNA, 20 nt, Artificial Sequence
  RPE65 RNA guide
aagucagcagacauuuucua

SEQ ID NO: 31294 - RNA, 20 nt, Artificial Sequence
  RPE65 RNA guide
aagugcuguccagcgcgagg

SEQ ID NO: 31295 - RNA, 20 nt, Artificial Sequence
  RPE65 RNA guide
aauagauuuccccaaacacc

SEQ ID NO: 31296 - RNA, 20 nt, Artificial Sequence
  RPE65 RNA guide
aaucacugccagcucuauga

SEQ ID NO: 31297 - RNA, 20 nt, Artificial Sequence
  RPE65 RNA guide
aaucaggcugcugauauacu

SEQ ID NO: 31298 - RNA, 20 nt, Artificial Sequence
  RPE65 RNA guide
aauccauuugccuuuugcca

SEQ ID NO: 31299 - RNA, 20 nt, Artificial Sequence
  RPE65 RNA guide
aauccucucaagaugcuucu

SEQ ID NO: 31300 - RNA, 20 nt, Artificial Sequence
  RPE65 RNA guide
aauccuggcucuuuaaaauc

SEQ ID NO: 31301 - RNA, 20 nt, Artificial Sequence
  RPE65 RNA guide
aaucuauuagguggagaguc

SEQ ID NO: 31302 - RNA, 20 nt, Artificial Sequence
  RPE65 RNA guide
aaugaaaaaacaggaauccu

SEQ ID NO: 31303 - RNA, 20 nt, Artificial Sequence
  RPE65 RNA guide
aaugaaaaucacugccagcu

SEQ ID NO: 31304 - RNA, 20 nt, Artificial Sequence
  RPE65 RNA guide
aaugagauggcaaaaggcaa

SEQ ID NO: 31305 - RNA, 20 nt, Artificial Sequence
  RPE65 RNA guide
aauggauugguguuugggga

SEQ ID NO: 31306 - RNA, 20 nt, Artificial Sequence
  RPE65 RNA guide
aaugucugcugacuugacuc

SEQ ID NO: 31307 - RNA, 20 nt, Artificial Sequence
  RPE65 RNA guide
aauguucugucuccccuuca

SEQ ID NO: 31308 - RNA, 20 nt, Artificial Sequence
  RPE65 RNA guide
acaagccuagcccaaggcag

SEQ ID NO: 31309 - RNA, 20 nt, Artificial Sequence
  RPE65 RNA guide
acaccaauccauuugccuuu

SEQ ID NO: 31310 - RNA, 20 nt, Artificial Sequence
  RPE65 RNA guide
acagaacauugcuucuuauc

SEQ ID NO: 31311 - RNA, 20 nt, Artificial Sequence
  RPE65 RNA guide
acagcacuuagaaaaugucu

SEQ ID NO: 31312 - RNA, 20 nt, Artificial Sequence
  RPE65 RNA guide
acaggaauccuggcucuuua

SEQ ID NO: 31313 - RNA, 20 nt, Artificial Sequence
  RPE65 RNA guide
acauugcuucuuaucccugc

SEQ ID NO: 31314 - RNA, 20 nt, Artificial Sequence
  RPE65 RNA guide
acauuuucuaagugcugucc

SEQ ID NO: 31315 - RNA, 20 nt, Artificial Sequence
  RPE65 RNA guide
accaaggacaagccuagccc

SEQ ID NO: 31316 - RNA, 20 nt, Artificial Sequence
  RPE65 RNA guide
accaauccauuugccuuuug

SEQ ID NO: 31317 - RNA, 20 nt, Artificial Sequence
  RPE65 RNA guide
acccuuuauccacacucugg

SEQ ID NO: 31318 - RNA, 20 nt, Artificial Sequence
  RPE65 RNA guide
accuaauagauuuccccaaa

SEQ ID NO: 31319 - RNA, 20 nt, Artificial Sequence
  RPE65 RNA guide
accuucacuaggagaucaca

SEQ ID NO: 31320 - RNA, 20 nt, Artificial Sequence
  RPE65 RNA guide
acuaggagaucacaccuugg

SEQ ID NO: 31321 - RNA, 20 nt, Artificial Sequence
  RPE65 RNA guide
acucaccuucacuaggagau

SEQ ID NO: 31322 - RNA, 20 nt, Artificial Sequence
  RPE65 RNA guide
acuccucacuccacuaaaau

SEQ ID NO: 31323 - RNA, 20 nt, Artificial Sequence
  RPE65 RNA guide
acuccuuccaacccuuuauc

SEQ ID NO: 31324 - RNA, 20 nt, Artificial Sequence
  RPE65 RNA guide
acucuccaccuaauagauuu

SEQ ID NO: 31325 - RNA, 20 nt, Artificial Sequence
  RPE65 RNA guide
acucugccuuaccaaggaca

SEQ ID NO: 31326 - RNA, 20 nt, Artificial Sequence
  RPE65 RNA guide
acugccagcucuaugaggaa

SEQ ID NO: 31327 - RNA, 20 nt, Artificial Sequence
  RPE65 RNA guide
acuuagaaaaugucugcuga

SEQ ID NO: 31328 - RNA, 20 nt, Artificial Sequence
  RPE65 RNA guide
acuucuacuccucacuccac

SEQ ID NO: 31329 - RNA, 20 nt, Artificial Sequence
  RPE65 RNA guide
acuugacucaccuucacuag

SEQ ID NO: 31330 - RNA, 20 nt, Artificial Sequence
  RPE65 RNA guide
agaaaaugucugcugacuug

SEQ ID NO: 31331 - RNA, 20 nt, Artificial Sequence
  RPE65 RNA guide
agaacauugcuucuuauccc

SEQ ID NO: 31332 - RNA, 20 nt, Artificial Sequence
  RPE65 RNA guide
agaagcaauguucugucucc

SEQ ID NO: 31333 - RNA, 20 nt, Artificial Sequence
  RPE65 RNA guide
agaagcaucuugagaggauu

SEQ ID NO: 31334 - RNA, 20 nt, Artificial Sequence
  RPE65 RNA guide
agaagcugcccaaucaggcu

SEQ ID NO: 31335 - RNA, 20 nt, Artificial Sequence
  RPE65 RNA guide
agacagaacauugcuucuua

SEQ ID NO: 31336 - RNA, 20 nt, Artificial Sequence
  RPE65 RNA guide
agacauuuucuaagugcugu

SEQ ID NO: 31337 - RNA, 20 nt, Artificial Sequence
  RPE65 RNA guide
agagccaggauuccuguuuu

SEQ ID NO: 31338 - RNA, 20 nt, Artificial Sequence
  RPE65 RNA guide
agagcuggcagugauuuuca

SEQ ID NO: 31339 - RNA, 20 nt, Artificial Sequence
  RPE65 RNA guide
agaggauugggacucuccac

SEQ ID NO: 31340 - RNA, 20 nt, Artificial Sequence
  RPE65 RNA guide
agaguauaucagcagccuga

SEQ ID NO: 31341 - RNA, 20 nt, Artificial Sequence
  RPE65 RNA guide
agagucccaauccucucaag

SEQ ID NO: 31342 - RNA, 20 nt, Artificial Sequence
  RPE65 RNA guide
agaguguggauaaaggguug

SEQ ID NO: 31343 - RNA, 20 nt, Artificial Sequence
  RPE65 RNA guide
agaugccccagaguguggau

SEQ ID NO: 31344 - RNA, 20 nt, Artificial Sequence
  RPE65 RNA guide
agaugcuucucccucacucc

SEQ ID NO: 31345 - RNA, 20 nt, Artificial Sequence
  RPE65 RNA guide
agauggcaaaaggcaaaugg

SEQ ID NO: 31346 - RNA, 20 nt, Artificial Sequence
  RPE65 RNA guide
agauuuccccaaacaccaau

SEQ ID NO: 31347 - RNA, 20 nt, Artificial Sequence
  RPE65 RNA guide
agauuuuaaagagccaggau

SEQ ID NO: 31348 - RNA, 20 nt, Artificial Sequence
  RPE65 RNA guide
agcaauguucugucuccccu

SEQ ID NO: 31349 - RNA, 20 nt, Artificial Sequence
  RPE65 RNA guide
agcacuuagaaaaugucugc

SEQ ID NO: 31350 - RNA, 20 nt, Artificial Sequence
  RPE65 RNA guide
agcagacauuuucuaagugc

SEQ ID NO: 31351 - RNA, 20 nt, Artificial Sequence
  RPE65 RNA guide
agcagccugauugggcagcu

SEQ ID NO: 31352 - RNA, 20 nt, Artificial Sequence
  RPE65 RNA guide
agcaucuugagaggauuggg

SEQ ID NO: 31353 - RNA, 20 nt, Artificial Sequence
  RPE65 RNA guide
agccaggauuccuguuuuuu

SEQ ID NO: 31354 - RNA, 20 nt, Artificial Sequence
  RPE65 RNA guide
agcccaaggcagggauaaga

SEQ ID NO: 31355 - RNA, 20 nt, Artificial Sequence
  RPE65 RNA guide
agcccucgcgcuggacagca

SEQ ID NO: 31356 - RNA, 20 nt, Artificial Sequence
  RPE65 RNA guide
agccuagcccaaggcaggga

SEQ ID NO: 31357 - RNA, 20 nt, Artificial Sequence
  RPE65 RNA guide
agccugauugggcagcuucu

SEQ ID NO: 31358 - RNA, 20 nt, Artificial Sequence
  RPE65 RNA guide
agcgcgagggcuggaaauga

SEQ ID NO: 31359 - RNA, 20 nt, Artificial Sequence
  RPE65 RNA guide
agcucuagauuuuaaagagc

SEQ ID NO: 31360 - RNA, 20 nt, Artificial Sequence
  RPE65 RNA guide
agcucuaugaggaagaagcu

SEQ ID NO: 31361 - RNA, 20 nt, Artificial Sequence
  RPE65 RNA guide
agcugcccaaucaggcugcu

SEQ ID NO: 31362 - RNA, 20 nt, Artificial Sequence
  RPE65 RNA guide
agcuggcagugauuuucauu

SEQ ID NO: 31363 - RNA, 20 nt, Artificial Sequence
  RPE65 RNA guide
agcuucuuccucauagagcu

SEQ ID NO: 31364 - RNA, 20 nt, Artificial Sequence
  RPE65 RNA guide
aggaagaagcugcccaauca

SEQ ID NO: 31365 - RNA, 20 nt, Artificial Sequence
  RPE65 RNA guide
aggaauccuggcucuuuaaa

SEQ ID NO: 31366 - RNA, 20 nt, Artificial Sequence
  RPE65 RNA guide
aggacaagccuagcccaagg

SEQ ID NO: 31367 - RNA, 20 nt, Artificial Sequence
  RPE65 RNA guide
aggagugagggagaagcauc

SEQ ID NO: 31368 - RNA, 20 nt, Artificial Sequence
  RPE65 RNA guide
aggauugggacucuccaccu

SEQ ID NO: 31369 - RNA, 20 nt, Artificial Sequence
  RPE65 RNA guide
aggcaaauggauugguguuu

SEQ ID NO: 31370 - RNA, 20 nt, Artificial Sequence
  RPE65 RNA guide
aggcagaguauaucagcagc

SEQ ID NO: 31371 - RNA, 20 nt, Artificial Sequence
  RPE65 RNA guide
aggcagggauaagaagcaau

SEQ ID NO: 31372 - RNA, 20 nt, Artificial Sequence
  RPE65 RNA guide
aggcugcugauauacucugc

SEQ ID NO: 31373 - RNA, 20 nt, Artificial Sequence
  RPE65 RNA guide
aggcuuguccuugguaaggc

SEQ ID NO: 31374 - RNA, 20 nt, Artificial Sequence
  RPE65 RNA guide
agggagaagcaucuugagag

SEQ ID NO: 31375 - RNA, 20 nt, Artificial Sequence
  RPE65 RNA guide
agggauaagaagcaauguuc

SEQ ID NO: 31376 - RNA, 20 nt, Artificial Sequence
  RPE65 RNA guide
agggcuggaaaugaaaauca

SEQ ID NO: 31377 - RNA, 20 nt, Artificial Sequence
  RPE65 RNA guide
aggggagacagaacauugcu

SEQ ID NO: 31378 - RNA, 20 nt, Artificial Sequence
  RPE65 RNA guide
aggguuggaaggagugaggg

SEQ ID NO: 31379 - RNA, 20 nt, Artificial Sequence
  RPE65 RNA guide
aggugagucaagucagcaga

SEQ ID NO: 31380 - RNA, 20 nt, Artificial Sequence
  RPE65 RNA guide
agguggagagucccaauccu

SEQ ID NO: 31381 - RNA, 20 nt, Artificial Sequence
  RPE65 RNA guide
aggugugaucuccuagugaa

SEQ ID NO: 31382 - RNA, 20 nt, Artificial Sequence
  RPE65 RNA guide
aguauaucagcagccugauu

SEQ ID NO: 31383 - RNA, 20 nt, Artificial Sequence
  RPE65 RNA guide
agucaagucagcagacauuu

SEQ ID NO: 31384 - RNA, 20 nt, Artificial Sequence
  RPE65 RNA guide
agucagcagacauuuucuaa

SEQ ID NO: 31385 - RNA, 20 nt, Artificial Sequence
  RPE65 RNA guide
agucccaauccucucaagau

SEQ ID NO: 31386 - RNA, 20 nt, Artificial Sequence
  RPE65 RNA guide
agugaaggugagucaaguca

SEQ ID NO: 31387 - RNA, 20 nt, Artificial Sequence
  RPE65 RNA guide
agugagggagaagcaucuug

SEQ ID NO: 31388 - RNA, 20 nt, Artificial Sequence
  RPE65 RNA guide
agugauuuucauuuccagcc

SEQ ID NO: 31389 - RNA, 20 nt, Artificial Sequence
  RPE65 RNA guide
agugcuguccagcgcgaggg

SEQ ID NO: 31390 - RNA, 20 nt, Artificial Sequence
  RPE65 RNA guide
aguguggauaaaggguugga

SEQ ID NO: 31391 - RNA, 20 nt, Artificial Sequence
  RPE65 RNA guide
auaaaggguuggaaggagug

SEQ ID NO: 31392 - RNA, 20 nt, Artificial Sequence
  RPE65 RNA guide
auaagaagcaauguucuguc

SEQ ID NO: 31393 - RNA, 20 nt, Artificial Sequence
  RPE65 RNA guide
auacucugccuuaccaagga

SEQ ID NO: 31394 - RNA, 20 nt, Artificial Sequence
  RPE65 RNA guide
auagagcuggcagugauuuu

SEQ ID NO: 31395 - RNA, 20 nt, Artificial Sequence
  RPE65 RNA guide
auagauuuccccaaacacca

SEQ ID NO: 31396 - RNA, 20 nt, Artificial Sequence
  RPE65 RNA guide
auagcucuagauuuuaaaga

SEQ ID NO: 31397 - RNA, 20 nt, Artificial Sequence
  RPE65 RNA guide
auauacucugccuuaccaag

SEQ ID NO: 31398 - RNA, 20 nt, Artificial Sequence
  RPE65 RNA guide
auauauuuuaguggagugag

SEQ ID NO: 31399 - RNA, 20 nt, Artificial Sequence
  RPE65 RNA guide
auaucagcagccugauuggg

SEQ ID NO: 31400 - RNA, 20 nt, Artificial Sequence
  RPE65 RNA guide
auauuuuaguggagugagga

SEQ ID NO: 31401 - RNA, 20 nt, Artificial Sequence
  RPE65 RNA guide
aucacugccagcucuaugag

SEQ ID NO: 31402 - RNA, 20 nt, Artificial Sequence
  RPE65 RNA guide
aucagcagccugauugggca

SEQ ID NO: 31403 - RNA, 20 nt, Artificial Sequence
  RPE65 RNA guide
aucaggcugcugauauacuc

SEQ ID NO: 31404 - RNA, 20 nt, Artificial Sequence
  RPE65 RNA guide
auccacacucuggggcaucu

SEQ ID NO: 31405 - RNA, 20 nt, Artificial Sequence
  RPE65 RNA guide
auccauuugccuuuugccau

SEQ ID NO: 31406 - RNA, 20 nt, Artificial Sequence
  RPE65 RNA guide
aucccugccuugggcuaggc

SEQ ID NO: 31407 - RNA, 20 nt, Artificial Sequence
  RPE65 RNA guide
auccucucaagaugcuucuc

SEQ ID NO: 31408 - RNA, 20 nt, Artificial Sequence
  RPE65 RNA guide
auccuggcucuuuaaaaucu

SEQ ID NO: 31409 - RNA, 20 nt, Artificial Sequence
  RPE65 RNA guide
aucuauuagguggagagucc

SEQ ID NO: 31410 - RNA, 20 nt, Artificial Sequence
  RPE65 RNA guide
aucuccuagugaaggugagu

SEQ ID NO: 31411 - RNA, 20 nt, Artificial Sequence
  RPE65 RNA guide
aucuugagaggauugggacu

SEQ ID NO: 31412 - RNA, 20 nt, Artificial Sequence
  RPE65 RNA guide
augaaaaaacaggaauccug

SEQ ID NO: 31413 - RNA, 20 nt, Artificial Sequence
  RPE65 RNA guide
augaaaaucacugccagcuc

SEQ ID NO: 31414 - RNA, 20 nt, Artificial Sequence
  RPE65 RNA guide
augaaggggagacagaacau

SEQ ID NO: 31415 - RNA, 20 nt, Artificial Sequence
  RPE65 RNA guide
augagauggcaaaaggcaaa

SEQ ID NO: 31416 - RNA, 20 nt, Artificial Sequence
  RPE65 RNA guide
augaggaagaagcugcccaa

SEQ ID NO: 31417 - RNA, 20 nt, Artificial Sequence
  RPE65 RNA guide
augccccagaguguggauaa

SEQ ID NO: 31418 - RNA, 20 nt, Artificial Sequence
  RPE65 RNA guide
augcuucucccucacuccuu

SEQ ID NO: 31419 - RNA, 20 nt, Artificial Sequence
  RPE65 RNA guide
auggauugguguuuggggaa

SEQ ID NO: 31420 - RNA, 20 nt, Artificial Sequence
  RPE65 RNA guide
auggcaaaaggcaaauggau

SEQ ID NO: 31421 - RNA, 20 nt, Artificial Sequence
  RPE65 RNA guide
augucugcugacuugacuca

SEQ ID NO: 31422 - RNA, 20 nt, Artificial Sequence
  RPE65 RNA guide
auguucugucuccccuucau

SEQ ID NO: 31423 - RNA, 20 nt, Artificial Sequence
  RPE65 RNA guide
auuagguggagagucccaau

SEQ ID NO: 31424 - RNA, 20 nt, Artificial Sequence
  RPE65 RNA guide
auugcuucuuaucccugccu

SEQ ID NO: 31425 - RNA, 20 nt, Artificial Sequence
  RPE65 RNA guide
auugggacucuccaccuaau

SEQ ID NO: 31426 - RNA, 20 nt, Artificial Sequence
  RPE65 RNA guide
auugggcagcuucuuccuca

SEQ ID NO: 31427 - RNA, 20 nt, Artificial Sequence
  RPE65 RNA guide
auugguguuuggggaaaucu

SEQ ID NO: 31428 - RNA, 20 nt, Artificial Sequence
  RPE65 RNA guide
auuuccagcccucgcgcugg

SEQ ID NO: 31429 - RNA, 20 nt, Artificial Sequence
  RPE65 RNA guide
auuucccaaggugugaucuc

SEQ ID NO: 31430 - RNA, 20 nt, Artificial Sequence
  RPE65 RNA guide
auuuccccaaacaccaaucc

SEQ ID NO: 31431 - RNA, 20 nt, Artificial Sequence
  RPE65 RNA guide
auuugccuuuugccaucuca

SEQ ID NO: 31432 - RNA, 20 nt, Artificial Sequence
  RPE65 RNA guide
auuuuaaagagccaggauuc

SEQ ID NO: 31433 - RNA, 20 nt, Artificial Sequence
  RPE65 RNA guide
auuuuaguggagugaggagu

SEQ ID NO: 31434 - RNA, 20 nt, Artificial Sequence
  RPE65 RNA guide
auuuucauuuccagcccucg

SEQ ID NO: 31435 - RNA, 20 nt, Artificial Sequence
  RPE65 RNA guide
auuuucuaagugcuguccag

SEQ ID NO: 31436 - RNA, 20 nt, Artificial Sequence
  RPE65 RNA guide
caaaaggcaaauggauuggu

SEQ ID NO: 31437 - RNA, 20 nt, Artificial Sequence
  RPE65 RNA guide
caaacaccaauccauuugcc

SEQ ID NO: 31438 - RNA, 20 nt, Artificial Sequence
  RPE65 RNA guide
caaauggauugguguuuggg

SEQ ID NO: 31439 - RNA, 20 nt, Artificial Sequence
  RPE65 RNA guide
caacccuuuauccacacucu

SEQ ID NO: 31440 - RNA, 20 nt, Artificial Sequence
  RPE65 RNA guide
caagaugcuucucccucacu

SEQ ID NO: 31441 - RNA, 20 nt, Artificial Sequence
  RPE65 RNA guide
caagccuagcccaaggcagg

SEQ ID NO: 31442 - RNA, 20 nt, Artificial Sequence
  RPE65 RNA guide
caaggacaagccuagcccaa

SEQ ID NO: 31443 - RNA, 20 nt, Artificial Sequence
  RPE65 RNA guide
caaggcagggauaagaagca

SEQ ID NO: 31444 - RNA, 20 nt, Artificial Sequence
  RPE65 RNA guide
caaggugugaucuccuagug

SEQ ID NO: 31445 - RNA, 20 nt, Artificial Sequence
  RPE65 RNA guide
caagucagcagacauuuucu

SEQ ID NO: 31446 - RNA, 20 nt, Artificial Sequence
  RPE65 RNA guide
caaucaggcugcugauauac

SEQ ID NO: 31447 - RNA, 20 nt, Artificial Sequence
  RPE65 RNA guide
caauccauuugccuuuugcc

SEQ ID NO: 31448 - RNA, 20 nt, Artificial Sequence
  RPE65 RNA guide
caauccucucaagaugcuuc

SEQ ID NO: 31449 - RNA, 20 nt, Artificial Sequence
  RPE65 RNA guide
caauguucugucuccccuuc

SEQ ID NO: 31450 - RNA, 20 nt, Artificial Sequence
  RPE65 RNA guide
caccaauccauuugccuuuu

SEQ ID NO: 31451 - RNA, 20 nt, Artificial Sequence
  RPE65 RNA guide
caccuaauagauuuccccaa

SEQ ID NO: 31452 - RNA, 20 nt, Artificial Sequence
  RPE65 RNA guide
caccuucacuaggagaucac

SEQ ID NO: 31453 - RNA, 20 nt, Artificial Sequence
  RPE65 RNA guide
cacuaggagaucacaccuug

SEQ ID NO: 31454 - RNA, 20 nt, Artificial Sequence
  RPE65 RNA guide
cacuccuuccaacccuuuau

SEQ ID NO: 31455 - RNA, 20 nt, Artificial Sequence
  RPE65 RNA guide
cacugccagcucuaugagga

SEQ ID NO: 31456 - RNA, 20 nt, Artificial Sequence
  RPE65 RNA guide
cacuuagaaaaugucugcug

SEQ ID NO: 31457 - RNA, 20 nt, Artificial Sequence
  RPE65 RNA guide
cagaacauugcuucuuaucc

SEQ ID NO: 31458 - RNA, 20 nt, Artificial Sequence
  RPE65 RNA guide
cagacauuuucuaagugcug

SEQ ID NO: 31459 - RNA, 20 nt, Artificial Sequence
  RPE65 RNA guide
cagaguauaucagcagccug

SEQ ID NO: 31460 - RNA, 20 nt, Artificial Sequence
  RPE65 RNA guide
cagaguguggauaaaggguu

SEQ ID NO: 31461 - RNA, 20 nt, Artificial Sequence
  RPE65 RNA guide
cagcacuuagaaaaugucug

SEQ ID NO: 31462 - RNA, 20 nt, Artificial Sequence
  RPE65 RNA guide
cagcagacauuuucuaagug

SEQ ID NO: 31463 - RNA, 20 nt, Artificial Sequence
  RPE65 RNA guide
cagcagccugauugggcagc

SEQ ID NO: 31464 - RNA, 20 nt, Artificial Sequence
  RPE65 RNA guide
cagcccucgcgcuggacagc

SEQ ID NO: 31465 - RNA, 20 nt, Artificial Sequence
  RPE65 RNA guide
cagccugauugggcagcuuc

SEQ ID NO: 31466 - RNA, 20 nt, Artificial Sequence
  RPE65 RNA guide
cagcgcgagggcuggaaaug

SEQ ID NO: 31467 - RNA, 20 nt, Artificial Sequence
  RPE65 RNA guide
cagcucuaugaggaagaagc

SEQ ID NO: 31468 - RNA, 20 nt, Artificial Sequence
  RPE65 RNA guide
cagcuucuuccucauagagc

SEQ ID NO: 31469 - RNA, 20 nt, Artificial Sequence
  RPE65 RNA guide
caggaauccuggcucuuuaa

SEQ ID NO: 31470 - RNA, 20 nt, Artificial Sequence
  RPE65 RNA guide
caggcugcugauauacucug

SEQ ID NO: 31471 - RNA, 20 nt, Artificial Sequence
  RPE65 RNA guide
cagggauaagaagcaauguu

SEQ ID NO: 31472 - RNA, 20 nt, Artificial Sequence
  RPE65 RNA guide
cagugauuuucauuuccagc

SEQ ID NO: 31473 - RNA, 20 nt, Artificial Sequence
  RPE65 RNA guide
cauagagcuggcagugauuu

SEQ ID NO: 31474 - RNA, 20 nt, Artificial Sequence
  RPE65 RNA guide
caucuugagaggauugggac

SEQ ID NO: 31475 - RNA, 20 nt, Artificial Sequence
  RPE65 RNA guide
cauugcuucuuaucccugcc

SEQ ID NO: 31476 - RNA, 20 nt, Artificial Sequence
  RPE65 RNA guide
cauuuccagcccucgcgcug

SEQ ID NO: 31477 - RNA, 20 nt, Artificial Sequence
  RPE65 RNA guide
cauuugccuuuugccaucuc

SEQ ID NO: 31478 - RNA, 20 nt, Artificial Sequence
  RPE65 RNA guide
cauuuucuaagugcugucca

SEQ ID NO: 31479 - RNA, 20 nt, Artificial Sequence
  RPE65 RNA guide
ccaaacaccaauccauuugc

SEQ ID NO: 31480 - RNA, 20 nt, Artificial Sequence
  RPE65 RNA guide
ccaacccuuuauccacacuc

SEQ ID NO: 31481 - RNA, 20 nt, Artificial Sequence
  RPE65 RNA guide
ccaaggacaagccuagccca

SEQ ID NO: 31482 - RNA, 20 nt, Artificial Sequence
  RPE65 RNA guide
ccaaggcagggauaagaagc

SEQ ID NO: 31483 - RNA, 20 nt, Artificial Sequence
  RPE65 RNA guide
ccaaggugugaucuccuagu

SEQ ID NO: 31484 - RNA, 20 nt, Artificial Sequence
  RPE65 RNA guide
ccaaucaggcugcugauaua

SEQ ID NO: 31485 - RNA, 20 nt, Artificial Sequence
  RPE65 RNA guide
ccaauccauuugccuuuugc

SEQ ID NO: 31486 - RNA, 20 nt, Artificial Sequence
  RPE65 RNA guide
ccaauccucucaagaugcuu

SEQ ID NO: 31487 - RNA, 20 nt, Artificial Sequence
  RPE65 RNA guide
ccaccuaauagauuucccca

SEQ ID NO: 31488 - RNA, 20 nt, Artificial Sequence
  RPE65 RNA guide
ccagaguguggauaaagggu

SEQ ID NO: 31489 - RNA, 20 nt, Artificial Sequence
  RPE65 RNA guide
ccagcccucgcgcuggacag

SEQ ID NO: 31490 - RNA, 20 nt, Artificial Sequence
  RPE65 RNA guide
ccagcgcgagggcuggaaau

SEQ ID NO: 31491 - RNA, 20 nt, Artificial Sequence
  RPE65 RNA guide
ccagcucuaugaggaagaag

SEQ ID NO: 31492 - RNA, 20 nt, Artificial Sequence
  RPE65 RNA guide
ccaggauuccuguuuuuuca

SEQ ID NO: 31493 - RNA, 20 nt, Artificial Sequence
  RPE65 RNA guide
ccauuugccuuuugccaucu

SEQ ID NO: 31494 - RNA, 20 nt, Artificial Sequence
  RPE65 RNA guide
cccaaacaccaauccauuug

SEQ ID NO: 31495 - RNA, 20 nt, Artificial Sequence
  RPE65 RNA guide
cccaaggcagggauaagaag

SEQ ID NO: 31496 - RNA, 20 nt, Artificial Sequence
  RPE65 RNA guide
cccaaggugugaucuccuag

SEQ ID NO: 31497 - RNA, 20 nt, Artificial Sequence
  RPE65 RNA guide
cccaaucaggcugcugauau

SEQ ID NO: 31498 - RNA, 20 nt, Artificial Sequence
  RPE65 RNA guide
cccaauccucucaagaugcu

SEQ ID NO: 31499 - RNA, 20 nt, Artificial Sequence
  RPE65 RNA guide
cccagaguguggauaaaggg

SEQ ID NO: 31500 - RNA, 20 nt, Artificial Sequence
  RPE65 RNA guide
ccccaaacaccaauccauuu

SEQ ID NO: 31501 - RNA, 20 nt, Artificial Sequence
  RPE65 RNA guide
ccccagaguguggauaaagg

SEQ ID NO: 31502 - RNA, 20 nt, Artificial Sequence
  RPE65 RNA guide
cccucacuccuuccaacccu

SEQ ID NO: 31503 - RNA, 20 nt, Artificial Sequence
  RPE65 RNA guide
cccucgcgcuggacagcacu

SEQ ID NO: 31504 - RNA, 20 nt, Artificial Sequence
  RPE65 RNA guide
cccugccuugggcuaggcuu

SEQ ID NO: 31505 - RNA, 20 nt, Artificial Sequence
  RPE65 RNA guide
cccuuuauccacacucuggg

SEQ ID NO: 31506 - RNA, 20 nt, Artificial Sequence
  RPE65 RNA guide
ccuaauagauuuccccaaac

SEQ ID NO: 31507 - RNA, 20 nt, Artificial Sequence
  RPE65 RNA guide
ccuagcccaaggcagggaua

SEQ ID NO: 31508 - RNA, 20 nt, Artificial Sequence
  RPE65 RNA guide
ccuagugaaggugagucaag

SEQ ID NO: 31509 - RNA, 20 nt, Artificial Sequence
  RPE65 RNA guide
ccucacuccacuaaaauaua

SEQ ID NO: 31510 - RNA, 20 nt, Artificial Sequence
  RPE65 RNA guide
ccucacuccuuccaacccuu

SEQ ID NO: 31511 - RNA, 20 nt, Artificial Sequence
  RPE65 RNA guide
ccucauagagcuggcaguga

SEQ ID NO: 31512 - RNA, 20 nt, Artificial Sequence
  RPE65 RNA guide
ccucgcgcuggacagcacuu

SEQ ID NO: 31513 - RNA, 20 nt, Artificial Sequence
  RPE65 RNA guide
ccucucaagaugcuucuccc

SEQ ID NO: 31514 - RNA, 20 nt, Artificial Sequence
  RPE65 RNA guide
ccugauugggcagcuucuuc

SEQ ID NO: 31515 - RNA, 20 nt, Artificial Sequence
  RPE65 RNA guide
ccugccuugggcuaggcuug

SEQ ID NO: 31516 - RNA, 20 nt, Artificial Sequence
  RPE65 RNA guide
ccuggcucuuuaaaaucuag

SEQ ID NO: 31517 - RNA, 20 nt, Artificial Sequence
  RPE65 RNA guide
ccuuaccaaggacaagccua

SEQ ID NO: 31518 - RNA, 20 nt, Artificial Sequence
  RPE65 RNA guide
ccuucacuaggagaucacac

SEQ ID NO: 31519 - RNA, 20 nt, Artificial Sequence
  RPE65 RNA guide
ccuuccaacccuuuauccac

SEQ ID NO: 31520 - RNA, 20 nt, Artificial Sequence
  RPE65 RNA guide
ccuugggcuaggcuuguccu

SEQ ID NO: 31521 - RNA, 20 nt, Artificial Sequence
  RPE65 RNA guide
ccuugguaaggcagaguaua

SEQ ID NO: 31522 - RNA, 20 nt, Artificial Sequence
  RPE65 RNA guide
ccuuuauccacacucugggg

SEQ ID NO: 31523 - RNA, 20 nt, Artificial Sequence
  RPE65 RNA guide
ccuuuugccaucucauuuuu

SEQ ID NO: 31524 - RNA, 20 nt, Artificial Sequence
  RPE65 RNA guide
cgagggcuggaaaugaaaau

SEQ ID NO: 31525 - RNA, 20 nt, Artificial Sequence
  RPE65 RNA guide
cgcgagggcuggaaaugaaa

SEQ ID NO: 31526 - RNA, 20 nt, Artificial Sequence
  RPE65 RNA guide
cgcgcuggacagcacuuaga

SEQ ID NO: 31527 - RNA, 20 nt, Artificial Sequence
  RPE65 RNA guide
cgcuggacagcacuuagaaa

SEQ ID NO: 31528 - RNA, 20 nt, Artificial Sequence
  RPE65 RNA guide
cuaagugcuguccagcgcga

SEQ ID NO: 31529 - RNA, 20 nt, Artificial Sequence
  RPE65 RNA guide
cuaauagauuuccccaaaca

SEQ ID NO: 31530 - RNA, 20 nt, Artificial Sequence
  RPE65 RNA guide
cuacuccucacuccacuaaa

SEQ ID NO: 31531 - RNA, 20 nt, Artificial Sequence
  RPE65 RNA guide
cuagauuuuaaagagccagg

SEQ ID NO: 31532 - RNA, 20 nt, Artificial Sequence
  RPE65 RNA guide
cuagcccaaggcagggauaa

SEQ ID NO: 31533 - RNA, 20 nt, Artificial Sequence
  RPE65 RNA guide
cuaggcuuguccuugguaag

SEQ ID NO: 31534 - RNA, 20 nt, Artificial Sequence
  RPE65 RNA guide
cuagugaaggugagucaagu

SEQ ID NO: 31535 - RNA, 20 nt, Artificial Sequence
  RPE65 RNA guide
cuaugaggaagaagcugccc

SEQ ID NO: 31536 - RNA, 20 nt, Artificial Sequence
  RPE65 RNA guide
cuauuagguggagaguccca

SEQ ID NO: 31537 - RNA, 20 nt, Artificial Sequence
  RPE65 RNA guide
cucaagaugcuucucccuca

SEQ ID NO: 31538 - RNA, 20 nt, Artificial Sequence
  RPE65 RNA guide
cucaccuucacuaggagauc

SEQ ID NO: 31539 - RNA, 20 nt, Artificial Sequence
  RPE65 RNA guide
cucacuccacuaaaauauau

SEQ ID NO: 31540 - RNA, 20 nt, Artificial Sequence
  RPE65 RNA guide
cucacuccuuccaacccuuu

SEQ ID NO: 31541 - RNA, 20 nt, Artificial Sequence
  RPE65 RNA guide
cucauagagcuggcagugau

SEQ ID NO: 31542 - RNA, 20 nt, Artificial Sequence
  RPE65 RNA guide
cuccaccuaauagauuuccc

SEQ ID NO: 31543 - RNA, 20 nt, Artificial Sequence
  RPE65 RNA guide
cucccucacuccuuccaacc

SEQ ID NO: 31544 - RNA, 20 nt, Artificial Sequence
  RPE65 RNA guide
cuccuagugaaggugaguca

SEQ ID NO: 31545 - RNA, 20 nt, Artificial Sequence
  RPE65 RNA guide
cuccucacuccacuaaaaua

SEQ ID NO: 31546 - RNA, 20 nt, Artificial Sequence
  RPE65 RNA guide
cuccuuccaacccuuuaucc

SEQ ID NO: 31547 - RNA, 20 nt, Artificial Sequence
  RPE65 RNA guide
cucgcgcuggacagcacuua

SEQ ID NO: 31548 - RNA, 20 nt, Artificial Sequence
  RPE65 RNA guide
cucuagauuuuaaagagcca

SEQ ID NO: 31549 - RNA, 20 nt, Artificial Sequence
  RPE65 RNA guide
cucuaugaggaagaagcugc

SEQ ID NO: 31550 - RNA, 20 nt, Artificial Sequence
  RPE65 RNA guide
cucucaagaugcuucucccu

SEQ ID NO: 31551 - RNA, 20 nt, Artificial Sequence
  RPE65 RNA guide
cucuccaccuaauagauuuc

SEQ ID NO: 31552 - RNA, 20 nt, Artificial Sequence
  RPE65 RNA guide
cucugccuuaccaaggacaa

SEQ ID NO: 31553 - RNA, 20 nt, Artificial Sequence
  RPE65 RNA guide
cugacuugacucaccuucac

SEQ ID NO: 31554 - RNA, 20 nt, Artificial Sequence
  RPE65 RNA guide
cugauauacucugccuuacc

SEQ ID NO: 31555 - RNA, 20 nt, Artificial Sequence
  RPE65 RNA guide
cugauugggcagcuucuucc

SEQ ID NO: 31556 - RNA, 20 nt, Artificial Sequence
  RPE65 RNA guide
cugccagcucuaugaggaag

SEQ ID NO: 31557 - RNA, 20 nt, Artificial Sequence
  RPE65 RNA guide
cugcccaaucaggcugcuga

SEQ ID NO: 31558 - RNA, 20 nt, Artificial Sequence
  RPE65 RNA guide
cugccuuaccaaggacaagc

SEQ ID NO: 31559 - RNA, 20 nt, Artificial Sequence
  RPE65 RNA guide
cugccuugggcuaggcuugu

SEQ ID NO: 31560 - RNA, 20 nt, Artificial Sequence
  RPE65 RNA guide
cugcugacuugacucaccuu

SEQ ID NO: 31561 - RNA, 20 nt, Artificial Sequence
  RPE65 RNA guide
cugcugauauacucugccuu

SEQ ID NO: 31562 - RNA, 20 nt, Artificial Sequence
  RPE65 RNA guide
cuggaaaugaaaaucacugc

SEQ ID NO: 31563 - RNA, 20 nt, Artificial Sequence
  RPE65 RNA guide
cuggacagcacuuagaaaau

SEQ ID NO: 31564 - RNA, 20 nt, Artificial Sequence
  RPE65 RNA guide
cuggcagugauuuucauuuc

SEQ ID NO: 31565 - RNA, 20 nt, Artificial Sequence
  RPE65 RNA guide
cuggcucuuuaaaaucuaga

SEQ ID NO: 31566 - RNA, 20 nt, Artificial Sequence
  RPE65 RNA guide
cuguccagcgcgagggcugg

SEQ ID NO: 31567 - RNA, 20 nt, Artificial Sequence
  RPE65 RNA guide
cugugaugaaggggagacag

SEQ ID NO: 31568 - RNA, 20 nt, Artificial Sequence
  RPE65 RNA guide
cuuaaaaaugagauggcaaa

SEQ ID NO: 31569 - RNA, 20 nt, Artificial Sequence
  RPE65 RNA guide
cuuaccaaggacaagccuag

SEQ ID NO: 31570 - RNA, 20 nt, Artificial Sequence
  RPE65 RNA guide
cuuagaaaaugucugcugac

SEQ ID NO: 31571 - RNA, 20 nt, Artificial Sequence
  RPE65 RNA guide
cuuaucccugccuugggcua

SEQ ID NO: 31572 - RNA, 20 nt, Artificial Sequence
  RPE65 RNA guide
cuucacuaggagaucacacc

SEQ ID NO: 31573 - RNA, 20 nt, Artificial Sequence
  RPE65 RNA guide
cuuccaacccuuuauccaca

SEQ ID NO: 31574 - RNA, 20 nt, Artificial Sequence
  RPE65 RNA guide
cuuccucauagagcuggcag

SEQ ID NO: 31575 - RNA, 20 nt, Artificial Sequence
  RPE65 RNA guide
cuucuacuccucacuccacu

SEQ ID NO: 31576 - RNA, 20 nt, Artificial Sequence
  RPE65 RNA guide
cuucucccucacuccuucca

SEQ ID NO: 31577 - RNA, 20 nt, Artificial Sequence
  RPE65 RNA guide
cuucuuaucccugccuuggg

SEQ ID NO: 31578 - RNA, 20 nt, Artificial Sequence
  RPE65 RNA guide
cuucuuccucauagagcugg

SEQ ID NO: 31579 - RNA, 20 nt, Artificial Sequence
  RPE65 RNA guide
cuugacucaccuucacuagg

SEQ ID NO: 31580 - RNA, 20 nt, Artificial Sequence
  RPE65 RNA guide
cuugagaggauugggacucu

SEQ ID NO: 31581 - RNA, 20 nt, Artificial Sequence
  RPE65 RNA guide
cuugauauauuuuaguggag

SEQ ID NO: 31582 - RNA, 20 nt, Artificial Sequence
  RPE65 RNA guide
cuugggcuaggcuuguccuu

SEQ ID NO: 31583 - RNA, 20 nt, Artificial Sequence
  RPE65 RNA guide
cuugguaaggcagaguauau

SEQ ID NO: 31584 - RNA, 20 nt, Artificial Sequence
  RPE65 RNA guide
cuuguccuugguaaggcaga

SEQ ID NO: 31585 - RNA, 20 nt, Artificial Sequence
  RPE65 RNA guide
cuuuauccacacucuggggc

SEQ ID NO: 31586 - RNA, 20 nt, Artificial Sequence
  RPE65 RNA guide
gaaaaaacaggaauccuggc

SEQ ID NO: 31587 - RNA, 20 nt, Artificial Sequence
  RPE65 RNA guide
gaaaaucacugccagcucua

SEQ ID NO: 31588 - RNA, 20 nt, Artificial Sequence
  RPE65 RNA guide
gaaaaugucugcugacuuga

SEQ ID NO: 31589 - RNA, 20 nt, Artificial Sequence
  RPE65 RNA guide
gaaaucuauuagguggagag

SEQ ID NO: 31590 - RNA, 20 nt, Artificial Sequence
  RPE65 RNA guide
gaaaugaaaaucacugccag

SEQ ID NO: 31591 - RNA, 20 nt, Artificial Sequence
  RPE65 RNA guide
gaacauugcuucuuaucccu

SEQ ID NO: 31592 - RNA, 20 nt, Artificial Sequence
  RPE65 RNA guide
gaagaagcugcccaaucagg

SEQ ID NO: 31593 - RNA, 20 nt, Artificial Sequence
  RPE65 RNA guide
gaagcaauguucugucuccc

SEQ ID NO: 31594 - RNA, 20 nt, Artificial Sequence
  RPE65 RNA guide
gaagcaucuugagaggauug

SEQ ID NO: 31595 - RNA, 20 nt, Artificial Sequence
  RPE65 RNA guide
gaagcugcccaaucaggcug

SEQ ID NO: 31596 - RNA, 20 nt, Artificial Sequence
  RPE65 RNA guide
gaaggagugagggagaagca

SEQ ID NO: 31597 - RNA, 20 nt, Artificial Sequence
  RPE65 RNA guide
gaaggggagacagaacauug

SEQ ID NO: 31598 - RNA, 20 nt, Artificial Sequence
  RPE65 RNA guide
gaaggugagucaagucagca

SEQ ID NO: 31599 - RNA, 20 nt, Artificial Sequence
  RPE65 RNA guide
gaauccuggcucuuuaaaau

SEQ ID NO: 31600 - RNA, 20 nt, Artificial Sequence
  RPE65 RNA guide
gacaagccuagcccaaggca

SEQ ID NO: 31601 - RNA, 20 nt, Artificial Sequence
  RPE65 RNA guide
gacagaacauugcuucuuau

SEQ ID NO: 31602 - RNA, 20 nt, Artificial Sequence
  RPE65 RNA guide
gacagcacuuagaaaauguc

SEQ ID NO: 31603 - RNA, 20 nt, Artificial Sequence
  RPE65 RNA guide
gacauuuucuaagugcuguc

SEQ ID NO: 31604 - RNA, 20 nt, Artificial Sequence
  RPE65 RNA guide
gacucaccuucacuaggaga

SEQ ID NO: 31605 - RNA, 20 nt, Artificial Sequence
  RPE65 RNA guide
gacucuccaccuaauagauu

SEQ ID NO: 31606 - RNA, 20 nt, Artificial Sequence
  RPE65 RNA guide
gacuugacucaccuucacua

SEQ ID NO: 31607 - RNA, 20 nt, Artificial Sequence
  RPE65 RNA guide
gagaagcaucuugagaggau

SEQ ID NO: 31608 - RNA, 20 nt, Artificial Sequence
  RPE65 RNA guide
gagacagaacauugcuucuu

SEQ ID NO: 31609 - RNA, 20 nt, Artificial Sequence
  RPE65 RNA guide
gagaggauugggacucucca

SEQ ID NO: 31610 - RNA, 20 nt, Artificial Sequence
  RPE65 RNA guide
gagagucccaauccucucaa

SEQ ID NO: 31611 - RNA, 20 nt, Artificial Sequence
  RPE65 RNA guide
gagaugccccagagugugga

SEQ ID NO: 31612 - RNA, 20 nt, Artificial Sequence
  RPE65 RNA guide
gagauggcaaaaggcaaaug

SEQ ID NO: 31613 - RNA, 20 nt, Artificial Sequence
  RPE65 RNA guide
gagccaggauuccuguuuuu

SEQ ID NO: 31614 - RNA, 20 nt, Artificial Sequence
  RPE65 RNA guide
gagcuggcagugauuuucau

SEQ ID NO: 31615 - RNA, 20 nt, Artificial Sequence
  RPE65 RNA guide
gaggaagaagcugcccaauc

SEQ ID NO: 31616 - RNA, 20 nt, Artificial Sequence
  RPE65 RNA guide
gaggauugggacucuccacc

SEQ ID NO: 31617 - RNA, 20 nt, Artificial Sequence
  RPE65 RNA guide
gagggagaagcaucuugaga

SEQ ID NO: 31618 - RNA, 20 nt, Artificial Sequence
  RPE65 RNA guide
gagggcuggaaaugaaaauc

SEQ ID NO: 31619 - RNA, 20 nt, Artificial Sequence
  RPE65 RNA guide
gaguauaucagcagccugau

SEQ ID NO: 31620 - RNA, 20 nt, Artificial Sequence
  RPE65 RNA guide
gagucaagucagcagacauu

SEQ ID NO: 31621 - RNA, 20 nt, Artificial Sequence
  RPE65 RNA guide
gagucccaauccucucaaga

SEQ ID NO: 31622 - RNA, 20 nt, Artificial Sequence
  RPE65 RNA guide
gagugagggagaagcaucuu

SEQ ID NO: 31623 - RNA, 20 nt, Artificial Sequence
  RPE65 RNA guide
gaguguggauaaaggguugg

SEQ ID NO: 31624 - RNA, 20 nt, Artificial Sequence
  RPE65 RNA guide
gauaaaggguuggaaggagu

SEQ ID NO: 31625 - RNA, 20 nt, Artificial Sequence
  RPE65 RNA guide
gauaagaagcaauguucugu

SEQ ID NO: 31626 - RNA, 20 nt, Artificial Sequence
  RPE65 RNA guide
gauauacucugccuuaccaa

SEQ ID NO: 31627 - RNA, 20 nt, Artificial Sequence
  RPE65 RNA guide
gauauauuuuaguggaguga

SEQ ID NO: 31628 - RNA, 20 nt, Artificial Sequence
  RPE65 RNA guide
gaucuccuagugaaggugag

SEQ ID NO: 31629 - RNA, 20 nt, Artificial Sequence
  RPE65 RNA guide
gaugaaggggagacagaaca

SEQ ID NO: 31630 - RNA, 20 nt, Artificial Sequence
  RPE65 RNA guide
gaugccccagaguguggaua

SEQ ID NO: 31631 - RNA, 20 nt, Artificial Sequence
  RPE65 RNA guide
gaugcuucucccucacuccu

SEQ ID NO: 31632 - RNA, 20 nt, Artificial Sequence
  RPE65 RNA guide
gauggcaaaaggcaaaugga

SEQ ID NO: 31633 - RNA, 20 nt, Artificial Sequence
  RPE65 RNA guide
gauugggacucuccaccuaa

SEQ ID NO: 31634 - RNA, 20 nt, Artificial Sequence
  RPE65 RNA guide
gauugggcagcuucuuccuc

SEQ ID NO: 31635 - RNA, 20 nt, Artificial Sequence
  RPE65 RNA guide
gauugguguuuggggaaauc

SEQ ID NO: 31636 - RNA, 20 nt, Artificial Sequence
  RPE65 RNA guide
gauuuccccaaacaccaauc

SEQ ID NO: 31637 - RNA, 20 nt, Artificial Sequence
  RPE65 RNA guide
gauuuuaaagagccaggauu

SEQ ID NO: 31638 - RNA, 20 nt, Artificial Sequence
  RPE65 RNA guide
gauuuucauuuccagcccuc

SEQ ID NO: 31639 - RNA, 20 nt, Artificial Sequence
  RPE65 RNA guide
gcaaaaggcaaauggauugg

SEQ ID NO: 31640 - RNA, 20 nt, Artificial Sequence
  RPE65 RNA guide
gcaaauggauugguguuugg

SEQ ID NO: 31641 - RNA, 20 nt, Artificial Sequence
  RPE65 RNA guide
gcaauguucugucuccccuu

SEQ ID NO: 31642 - RNA, 20 nt, Artificial Sequence
  RPE65 RNA guide
gcacuuagaaaaugucugcu

SEQ ID NO: 31643 - RNA, 20 nt, Artificial Sequence
  RPE65 RNA guide
gcagacauuuucuaagugcu

SEQ ID NO: 31644 - RNA, 20 nt, Artificial Sequence
  RPE65 RNA guide
gcagaguauaucagcagccu

SEQ ID NO: 31645 - RNA, 20 nt, Artificial Sequence
  RPE65 RNA guide
gcagccugauugggcagcuu

SEQ ID NO: 31646 - RNA, 20 nt, Artificial Sequence
  RPE65 RNA guide
gcagcuucuuccucauagag

SEQ ID NO: 31647 - RNA, 20 nt, Artificial Sequence
  RPE65 RNA guide
gcagggauaagaagcaaugu

SEQ ID NO: 31648 - RNA, 20 nt, Artificial Sequence
  RPE65 RNA guide
gcagugauuuucauuuccag

SEQ ID NO: 31649 - RNA, 20 nt, Artificial Sequence
  RPE65 RNA guide
gcaucuugagaggauuggga

SEQ ID NO: 31650 - RNA, 20 nt, Artificial Sequence
  RPE65 RNA guide
gccagcucuaugaggaagaa

SEQ ID NO: 31651 - RNA, 20 nt, Artificial Sequence
  RPE65 RNA guide
gccaggauuccuguuuuuuc

SEQ ID NO: 31652 - RNA, 20 nt, Artificial Sequence
  RPE65 RNA guide
gcccaaggcagggauaagaa

SEQ ID NO: 31653 - RNA, 20 nt, Artificial Sequence
  RPE65 RNA guide
gcccaaucaggcugcugaua

SEQ ID NO: 31654 - RNA, 20 nt, Artificial Sequence
  RPE65 RNA guide
gccccagaguguggauaaag

SEQ ID NO: 31655 - RNA, 20 nt, Artificial Sequence
  RPE65 RNA guide
gcccucgcgcuggacagcac

SEQ ID NO: 31656 - RNA, 20 nt, Artificial Sequence
  RPE65 RNA guide
gccuagcccaaggcagggau

SEQ ID NO: 31657 - RNA, 20 nt, Artificial Sequence
  RPE65 RNA guide
gccugauugggcagcuucuu

SEQ ID NO: 31658 - RNA, 20 nt, Artificial Sequence
  RPE65 RNA guide
gccuuaccaaggacaagccu

SEQ ID NO: 31659 - RNA, 20 nt, Artificial Sequence
  RPE65 RNA guide
gccuugggcuaggcuugucc

SEQ ID NO: 31660 - RNA, 20 nt, Artificial Sequence
  RPE65 RNA guide
gccuuuugccaucucauuuu

SEQ ID NO: 31661 - RNA, 20 nt, Artificial Sequence
  RPE65 RNA guide
gcgagggcuggaaaugaaaa

SEQ ID NO: 31662 - RNA, 20 nt, Artificial Sequence
  RPE65 RNA guide
gcgcgagggcuggaaaugaa

SEQ ID NO: 31663 - RNA, 20 nt, Artificial Sequence
  RPE65 RNA guide
gcgcuggacagcacuuagaa

SEQ ID NO: 31664 - RNA, 20 nt, Artificial Sequence
  RPE65 RNA guide
gcuaggcuuguccuugguaa

SEQ ID NO: 31665 - RNA, 20 nt, Artificial Sequence
  RPE65 RNA guide
gcucuagauuuuaaagagcc

SEQ ID NO: 31666 - RNA, 20 nt, Artificial Sequence
  RPE65 RNA guide
gcucuaugaggaagaagcug

SEQ ID NO: 31667 - RNA, 20 nt, Artificial Sequence
  RPE65 RNA guide
gcugacuugacucaccuuca

SEQ ID NO: 31668 - RNA, 20 nt, Artificial Sequence
  RPE65 RNA guide
gcugauauacucugccuuac

SEQ ID NO: 31669 - RNA, 20 nt, Artificial Sequence
  RPE65 RNA guide
gcugcccaaucaggcugcug

SEQ ID NO: 31670 - RNA, 20 nt, Artificial Sequence
  RPE65 RNA guide
gcugcugauauacucugccu

SEQ ID NO: 31671 - RNA, 20 nt, Artificial Sequence
  RPE65 RNA guide
gcuggaaaugaaaaucacug

SEQ ID NO: 31672 - RNA, 20 nt, Artificial Sequence
  RPE65 RNA guide
gcuggacagcacuuagaaaa

SEQ ID NO: 31673 - RNA, 20 nt, Artificial Sequence
  RPE65 RNA guide
gcuggcagugauuuucauuu

SEQ ID NO: 31674 - RNA, 20 nt, Artificial Sequence
  RPE65 RNA guide
gcuguccagcgcgagggcug

SEQ ID NO: 31675 - RNA, 20 nt, Artificial Sequence
  RPE65 RNA guide
gcuucucccucacuccuucc

SEQ ID NO: 31676 - RNA, 20 nt, Artificial Sequence
  RPE65 RNA guide
gcuucuuaucccugccuugg

SEQ ID NO: 31677 - RNA, 20 nt, Artificial Sequence
  RPE65 RNA guide
gcuucuuccucauagagcug

SEQ ID NO: 31678 - RNA, 20 nt, Artificial Sequence
  RPE65 RNA guide
gcuuguccuugguaaggcag

SEQ ID NO: 31679 - RNA, 20 nt, Artificial Sequence
  RPE65 RNA guide
ggaaaucuauuagguggaga

SEQ ID NO: 31680 - RNA, 20 nt, Artificial Sequence
  RPE65 RNA guide
ggaaaugaaaaucacugcca

SEQ ID NO: 31681 - RNA, 20 nt, Artificial Sequence
  RPE65 RNA guide
ggaagaagcugcccaaucag

SEQ ID NO: 31682 - RNA, 20 nt, Artificial Sequence
  RPE65 RNA guide
ggaaggagugagggagaagc

SEQ ID NO: 31683 - RNA, 20 nt, Artificial Sequence
  RPE65 RNA guide
ggaauccuggcucuuuaaaa

SEQ ID NO: 31684 - RNA, 20 nt, Artificial Sequence
  RPE65 RNA guide
ggacaagccuagcccaaggc

SEQ ID NO: 31685 - RNA, 20 nt, Artificial Sequence
  RPE65 RNA guide
ggacagcacuuagaaaaugu

SEQ ID NO: 31686 - RNA, 20 nt, Artificial Sequence
  RPE65 RNA guide
ggacucuccaccuaauagau

SEQ ID NO: 31687 - RNA, 20 nt, Artificial Sequence
  RPE65 RNA guide
ggagaagcaucuugagagga

SEQ ID NO: 31688 - RNA, 20 nt, Artificial Sequence
  RPE65 RNA guide
ggagacagaacauugcuucu

SEQ ID NO: 31689 - RNA, 20 nt, Artificial Sequence
  RPE65 RNA guide
ggagagucccaauccucuca

SEQ ID NO: 31690 - RNA, 20 nt, Artificial Sequence
  RPE65 RNA guide
ggagaugccccagagugugg

SEQ ID NO: 31691 - RNA, 20 nt, Artificial Sequence
  RPE65 RNA guide
ggagugagggagaagcaucu

SEQ ID NO: 31692 - RNA, 20 nt, Artificial Sequence
  RPE65 RNA guide
ggauaaaggguuggaaggag

SEQ ID NO: 31693 - RNA, 20 nt, Artificial Sequence
  RPE65 RNA guide
ggauaagaagcaauguucug

SEQ ID NO: 31694 - RNA, 20 nt, Artificial Sequence
  RPE65 RNA guide
ggauugggacucuccaccua

SEQ ID NO: 31695 - RNA, 20 nt, Artificial Sequence
  RPE65 RNA guide
ggauugguguuuggggaaau

SEQ ID NO: 31696 - RNA, 20 nt, Artificial Sequence
  RPE65 RNA guide
ggcaaaaggcaaauggauug

SEQ ID NO: 31697 - RNA, 20 nt, Artificial Sequence
  RPE65 RNA guide
ggcaaauggauugguguuug

SEQ ID NO: 31698 - RNA, 20 nt, Artificial Sequence
  RPE65 RNA guide
ggcagaguauaucagcagcc

SEQ ID NO: 31699 - RNA, 20 nt, Artificial Sequence
  RPE65 RNA guide
ggcagcuucuuccucauaga

SEQ ID NO: 31700 - RNA, 20 nt, Artificial Sequence
  RPE65 RNA guide
ggcagggauaagaagcaaug

SEQ ID NO: 31701 - RNA, 20 nt, Artificial Sequence
  RPE65 RNA guide
ggcagugauuuucauuucca

SEQ ID NO: 31702 - RNA, 20 nt, Artificial Sequence
  RPE65 RNA guide
ggcuaggcuuguccuuggua

SEQ ID NO: 31703 - RNA, 20 nt, Artificial Sequence
  RPE65 RNA guide
ggcugcugauauacucugcc

SEQ ID NO: 31704 - RNA, 20 nt, Artificial Sequence
  RPE65 RNA guide
ggcuggaaaugaaaaucacu

SEQ ID NO: 31705 - RNA, 20 nt, Artificial Sequence
  RPE65 RNA guide
ggcuuguccuugguaaggca

SEQ ID NO: 31706 - RNA, 20 nt, Artificial Sequence
  RPE65 RNA guide
gggaaaucuauuagguggag

SEQ ID NO: 31707 - RNA, 20 nt, Artificial Sequence
  RPE65 RNA guide
gggacucuccaccuaauaga

SEQ ID NO: 31708 - RNA, 20 nt, Artificial Sequence
  RPE65 RNA guide
gggagaagcaucuugagagg

SEQ ID NO: 31709 - RNA, 20 nt, Artificial Sequence
  RPE65 RNA guide
gggagacagaacauugcuuc

SEQ ID NO: 31710 - RNA, 20 nt, Artificial Sequence
  RPE65 RNA guide
gggauaagaagcaauguucu

SEQ ID NO: 31711 - RNA, 20 nt, Artificial Sequence
  RPE65 RNA guide
gggcagcuucuuccucauag

SEQ ID NO: 31712 - RNA, 20 nt, Artificial Sequence
  RPE65 RNA guide
gggcuaggcuuguccuuggu

SEQ ID NO: 31713 - RNA, 20 nt, Artificial Sequence
  RPE65 RNA guide
gggcuggaaaugaaaaucac

SEQ ID NO: 31714 - RNA, 20 nt, Artificial Sequence
  RPE65 RNA guide
ggggaaaucuauuaggugga

SEQ ID NO: 31715 - RNA, 20 nt, Artificial Sequence
  RPE65 RNA guide
ggggagacagaacauugcuu

SEQ ID NO: 31716 - RNA, 20 nt, Artificial Sequence
  RPE65 RNA guide
ggguuggaaggagugaggga

SEQ ID NO: 31717 - RNA, 20 nt, Artificial Sequence
  RPE65 RNA guide
gguaaggcagaguauaucag

SEQ ID NO: 31718 - RNA, 20 nt, Artificial Sequence
  RPE65 RNA guide
ggugagucaagucagcagac

SEQ ID NO: 31719 - RNA, 20 nt, Artificial Sequence
  RPE65 RNA guide
gguggagagucccaauccuc

SEQ ID NO: 31720 - RNA, 20 nt, Artificial Sequence
  RPE65 RNA guide
ggugugaucuccuagugaag

SEQ ID NO: 31721 - RNA, 20 nt, Artificial Sequence
  RPE65 RNA guide
gguguuuggggaaaucuauu

SEQ ID NO: 31722 - RNA, 20 nt, Artificial Sequence
  RPE65 RNA guide
gguuggaaggagugagggag

SEQ ID NO: 31723 - RNA, 20 nt, Artificial Sequence
  RPE65 RNA guide
guaaggcagaguauaucagc

SEQ ID NO: 31724 - RNA, 20 nt, Artificial Sequence
  RPE65 RNA guide
guauaucagcagccugauug

SEQ ID NO: 31725 - RNA, 20 nt, Artificial Sequence
  RPE65 RNA guide
gucaagucagcagacauuuu

SEQ ID NO: 31726 - RNA, 20 nt, Artificial Sequence
  RPE65 RNA guide
gucagcagacauuuucuaag

SEQ ID NO: 31727 - RNA, 20 nt, Artificial Sequence
  RPE65 RNA guide
guccagcgcgagggcuggaa

SEQ ID NO: 31728 - RNA, 20 nt, Artificial Sequence
  RPE65 RNA guide
gucccaauccucucaagaug

SEQ ID NO: 31729 - RNA, 20 nt, Artificial Sequence
  RPE65 RNA guide
guccuugguaaggcagagua

SEQ ID NO: 31730 - RNA, 20 nt, Artificial Sequence
  RPE65 RNA guide
gucugcugacuugacucacc

SEQ ID NO: 31731 - RNA, 20 nt, Artificial Sequence
  RPE65 RNA guide
gugaaggugagucaagucag

SEQ ID NO: 31732 - RNA, 20 nt, Artificial Sequence
  RPE65 RNA guide
gugagggagaagcaucuuga

SEQ ID NO: 31733 - RNA, 20 nt, Artificial Sequence
  RPE65 RNA guide
gugagucaagucagcagaca

SEQ ID NO: 31734 - RNA, 20 nt, Artificial Sequence
  RPE65 RNA guide
gugaucuccuagugaaggug

SEQ ID NO: 31735 - RNA, 20 nt, Artificial Sequence
  RPE65 RNA guide
gugaugaaggggagacagaa

SEQ ID NO: 31736 - RNA, 20 nt, Artificial Sequence
  RPE65 RNA guide
gugauuuucauuuccagccc

SEQ ID NO: 31737 - RNA, 20 nt, Artificial Sequence
  RPE65 RNA guide
gugcuguccagcgcgagggc

SEQ ID NO: 31738 - RNA, 20 nt, Artificial Sequence
  RPE65 RNA guide
guggagagucccaauccucu

SEQ ID NO: 31739 - RNA, 20 nt, Artificial Sequence
  RPE65 RNA guide
guggagaugccccagagugu

SEQ ID NO: 31740 - RNA, 20 nt, Artificial Sequence
  RPE65 RNA guide
guggauaaaggguuggaagg

SEQ ID NO: 31741 - RNA, 20 nt, Artificial Sequence
  RPE65 RNA guide
gugugaucuccuagugaagg

SEQ ID NO: 31742 - RNA, 20 nt, Artificial Sequence
  RPE65 RNA guide
guguggauaaaggguuggaa

SEQ ID NO: 31743 - RNA, 20 nt, Artificial Sequence
  RPE65 RNA guide
guguuuggggaaaucuauua

SEQ ID NO: 31744 - RNA, 20 nt, Artificial Sequence
  RPE65 RNA guide
guuggaaggagugagggaga

SEQ ID NO: 31745 - RNA, 20 nt, Artificial Sequence
  RPE65 RNA guide
guuuggggaaaucuauuagg

SEQ ID NO: 31746 - RNA, 20 nt, Artificial Sequence
  RPE65 RNA guide
uaaaaaugagauggcaaaag

SEQ ID NO: 31747 - RNA, 20 nt, Artificial Sequence
  RPE65 RNA guide
uaaagagccaggauuccugu

SEQ ID NO: 31748 - RNA, 20 nt, Artificial Sequence
  RPE65 RNA guide
uaaaggguuggaaggaguga

SEQ ID NO: 31749 - RNA, 20 nt, Artificial Sequence
  RPE65 RNA guide
uaaaugaaaaaacaggaauc

SEQ ID NO: 31750 - RNA, 20 nt, Artificial Sequence
  RPE65 RNA guide
uaagaagcaauguucugucu

SEQ ID NO: 31751 - RNA, 20 nt, Artificial Sequence
  RPE65 RNA guide
uaaggcagaguauaucagca

SEQ ID NO: 31752 - RNA, 20 nt, Artificial Sequence
  RPE65 RNA guide
uaagugcuguccagcgcgag

SEQ ID NO: 31753 - RNA, 20 nt, Artificial Sequence
  RPE65 RNA guide
uaauagauuuccccaaacac

SEQ ID NO: 31754 - RNA, 20 nt, Artificial Sequence
  RPE65 RNA guide
uaccaaggacaagccuagcc

SEQ ID NO: 31755 - RNA, 20 nt, Artificial Sequence
  RPE65 RNA guide
uacuccucacuccacuaaaa

SEQ ID NO: 31756 - RNA, 20 nt, Artificial Sequence
  RPE65 RNA guide
uacucugccuuaccaaggac

SEQ ID NO: 31757 - RNA, 20 nt, Artificial Sequence
  RPE65 RNA guide
uagaaaaugucugcugacuu

SEQ ID NO: 31758 - RNA, 20 nt, Artificial Sequence
  RPE65 RNA guide
uagagcuggcagugauuuuc

SEQ ID NO: 31759 - RNA, 20 nt, Artificial Sequence
  RPE65 RNA guide
uagauuuccccaaacaccaa

SEQ ID NO: 31760 - RNA, 20 nt, Artificial Sequence
  RPE65 RNA guide
uagauuuuaaagagccagga

SEQ ID NO: 31761 - RNA, 20 nt, Artificial Sequence
  RPE65 RNA guide
uagcccaaggcagggauaag

SEQ ID NO: 31762 - RNA, 20 nt, Artificial Sequence
  RPE65 RNA guide
uagcucuagauuuuaaagag

SEQ ID NO: 31763 - RNA, 20 nt, Artificial Sequence
  RPE65 RNA guide
uaggcuuguccuugguaagg

SEQ ID NO: 31764 - RNA, 20 nt, Artificial Sequence
  RPE65 RNA guide
uagguggagagucccaaucc

SEQ ID NO: 31765 - RNA, 20 nt, Artificial Sequence
  RPE65 RNA guide
uagugaaggugagucaaguc

SEQ ID NO: 31766 - RNA, 20 nt, Artificial Sequence
  RPE65 RNA guide
uauacucugccuuaccaagg

SEQ ID NO: 31767 - RNA, 20 nt, Artificial Sequence
  RPE65 RNA guide
uauaucagcagccugauugg

SEQ ID NO: 31768 - RNA, 20 nt, Artificial Sequence
  RPE65 RNA guide
uauauuuuaguggagugagg

SEQ ID NO: 31769 - RNA, 20 nt, Artificial Sequence
  RPE65 RNA guide
uaucagcagccugauugggc

SEQ ID NO: 31770 - RNA, 20 nt, Artificial Sequence
  RPE65 RNA guide
uauccacacucuggggcauc

SEQ ID NO: 31771 - RNA, 20 nt, Artificial Sequence
  RPE65 RNA guide
uaucccugccuugggcuagg

SEQ ID NO: 31772 - RNA, 20 nt, Artificial Sequence
  RPE65 RNA guide
uaugaggaagaagcugccca

SEQ ID NO: 31773 - RNA, 20 nt, Artificial Sequence
  RPE65 RNA guide
uauuagguggagagucccaa

SEQ ID NO: 31774 - RNA, 20 nt, Artificial Sequence
  RPE65 RNA guide
uauuuuaguggagugaggag

SEQ ID NO: 31775 - RNA, 20 nt, Artificial Sequence
  RPE65 RNA guide
ucaagaugcuucucccucac

SEQ ID NO: 31776 - RNA, 20 nt, Artificial Sequence
  RPE65 RNA guide
ucaagucagcagacauuuuc

SEQ ID NO: 31777 - RNA, 20 nt, Artificial Sequence
  RPE65 RNA guide
ucaccuucacuaggagauca

SEQ ID NO: 31778 - RNA, 20 nt, Artificial Sequence
  RPE65 RNA guide
ucacuaggagaucacaccuu

SEQ ID NO: 31779 - RNA, 20 nt, Artificial Sequence
  RPE65 RNA guide
ucacuccuuccaacccuuua

SEQ ID NO: 31780 - RNA, 20 nt, Artificial Sequence
  RPE65 RNA guide
ucacugccagcucuaugagg

SEQ ID NO: 31781 - RNA, 20 nt, Artificial Sequence
  RPE65 RNA guide
ucagcagacauuuucuaagu

SEQ ID NO: 31782 - RNA, 20 nt, Artificial Sequence
  RPE65 RNA guide
ucagcagccugauugggcag

SEQ ID NO: 31783 - RNA, 20 nt, Artificial Sequence
  RPE65 RNA guide
ucaggcugcugauauacucu

SEQ ID NO: 31784 - RNA, 20 nt, Artificial Sequence
  RPE65 RNA guide
ucauagagcuggcagugauu

SEQ ID NO: 31785 - RNA, 20 nt, Artificial Sequence
  RPE65 RNA guide
ucauuuccagcccucgcgcu

SEQ ID NO: 31786 - RNA, 20 nt, Artificial Sequence
  RPE65 RNA guide
uccaacccuuuauccacacu

SEQ ID NO: 31787 - RNA, 20 nt, Artificial Sequence
  RPE65 RNA guide
uccaccuaauagauuucccc

SEQ ID NO: 31788 - RNA, 20 nt, Artificial Sequence
  RPE65 RNA guide
uccagcccucgcgcuggaca

SEQ ID NO: 31789 - RNA, 20 nt, Artificial Sequence
  RPE65 RNA guide
uccagcgcgagggcuggaaa

SEQ ID NO: 31790 - RNA, 20 nt, Artificial Sequence
  RPE65 RNA guide
uccauuugccuuuugccauc

SEQ ID NO: 31791 - RNA, 20 nt, Artificial Sequence
  RPE65 RNA guide
ucccaaggugugaucuccua

SEQ ID NO: 31792 - RNA, 20 nt, Artificial Sequence
  RPE65 RNA guide
ucccaauccucucaagaugc

SEQ ID NO: 31793 - RNA, 20 nt, Artificial Sequence
  RPE65 RNA guide
uccccaaacaccaauccauu

SEQ ID NO: 31794 - RNA, 20 nt, Artificial Sequence
  RPE65 RNA guide
ucccucacuccuuccaaccc

SEQ ID NO: 31795 - RNA, 20 nt, Artificial Sequence
  RPE65 RNA guide
ucccugccuugggcuaggcu

SEQ ID NO: 31796 - RNA, 20 nt, Artificial Sequence
  RPE65 RNA guide
uccuagugaaggugagucaa

SEQ ID NO: 31797 - RNA, 20 nt, Artificial Sequence
  RPE65 RNA guide
uccucacuccacuaaaauau

SEQ ID NO: 31798 - RNA, 20 nt, Artificial Sequence
  RPE65 RNA guide
uccucauagagcuggcagug

SEQ ID NO: 31799 - RNA, 20 nt, Artificial Sequence
  RPE65 RNA guide
uccucucaagaugcuucucc

SEQ ID NO: 31800 - RNA, 20 nt, Artificial Sequence
  RPE65 RNA guide
uccuggcucuuuaaaaucua

SEQ ID NO: 31801 - RNA, 20 nt, Artificial Sequence
  RPE65 RNA guide
uccuuccaacccuuuaucca

SEQ ID NO: 31802 - RNA, 20 nt, Artificial Sequence
  RPE65 RNA guide
uccuugguaaggcagaguau

SEQ ID NO: 31803 - RNA, 20 nt, Artificial Sequence
  RPE65 RNA guide
ucgcgcuggacagcacuuag

SEQ ID NO: 31804 - RNA, 20 nt, Artificial Sequence
  RPE65 RNA guide
ucuaagugcuguccagcgcg

SEQ ID NO: 31805 - RNA, 20 nt, Artificial Sequence
  RPE65 RNA guide
ucuacuccucacuccacuaa

SEQ ID NO: 31806 - RNA, 20 nt, Artificial Sequence
  RPE65 RNA guide
ucuagauuuuaaagagccag

SEQ ID NO: 31807 - RNA, 20 nt, Artificial Sequence
  RPE65 RNA guide
ucuaugaggaagaagcugcc

SEQ ID NO: 31808 - RNA, 20 nt, Artificial Sequence
  RPE65 RNA guide
ucuauuagguggagaguccc

SEQ ID NO: 31809 - RNA, 20 nt, Artificial Sequence
  RPE65 RNA guide
ucucaagaugcuucucccuc

SEQ ID NO: 31810 - RNA, 20 nt, Artificial Sequence
  RPE65 RNA guide
ucuccaccuaauagauuucc

SEQ ID NO: 31811 - RNA, 20 nt, Artificial Sequence
  RPE65 RNA guide
ucucccucacuccuuccaac

SEQ ID NO: 31812 - RNA, 20 nt, Artificial Sequence
  RPE65 RNA guide
ucuccuagugaaggugaguc

SEQ ID NO: 31813 - RNA, 20 nt, Artificial Sequence
  RPE65 RNA guide
ucugccuuaccaaggacaag

SEQ ID NO: 31814 - RNA, 20 nt, Artificial Sequence
  RPE65 RNA guide
ucugcugacuugacucaccu

SEQ ID NO: 31815 - RNA, 20 nt, Artificial Sequence
  RPE65 RNA guide
ucuuaaaaaugagauggcaa

SEQ ID NO: 31816 - RNA, 20 nt, Artificial Sequence
  RPE65 RNA guide
ucuuaucccugccuugggcu

SEQ ID NO: 31817 - RNA, 20 nt, Artificial Sequence
  RPE65 RNA guide
ucuuccucauagagcuggca

SEQ ID NO: 31818 - RNA, 20 nt, Artificial Sequence
  RPE65 RNA guide
ucuugagaggauugggacuc

SEQ ID NO: 31819 - RNA, 20 nt, Artificial Sequence
  RPE65 RNA guide
ugaaaaaacaggaauccugg

SEQ ID NO: 31820 - RNA, 20 nt, Artificial Sequence
  RPE65 RNA guide
ugaaaaucacugccagcucu

SEQ ID NO: 31821 - RNA, 20 nt, Artificial Sequence
  RPE65 RNA guide
ugaaggggagacagaacauu

SEQ ID NO: 31822 - RNA, 20 nt, Artificial Sequence
  RPE65 RNA guide
ugaaggugagucaagucagc

SEQ ID NO: 31823 - RNA, 20 nt, Artificial Sequence
  RPE65 RNA guide
ugacucaccuucacuaggag

SEQ ID NO: 31824 - RNA, 20 nt, Artificial Sequence
  RPE65 RNA guide
ugacuugacucaccuucacu

SEQ ID NO: 31825 - RNA, 20 nt, Artificial Sequence
  RPE65 RNA guide
ugagaggauugggacucucc

SEQ ID NO: 31826 - RNA, 20 nt, Artificial Sequence
  RPE65 RNA guide
ugagauggcaaaaggcaaau

SEQ ID NO: 31827 - RNA, 20 nt, Artificial Sequence
  RPE65 RNA guide
ugaggaagaagcugcccaau

SEQ ID NO: 31828 - RNA, 20 nt, Artificial Sequence
  RPE65 RNA guide
ugagggagaagcaucuugag

SEQ ID NO: 31829 - RNA, 20 nt, Artificial Sequence
  RPE65 RNA guide
ugagucaagucagcagacau

SEQ ID NO: 31830 - RNA, 20 nt, Artificial Sequence
  RPE65 RNA guide
ugauauacucugccuuacca

SEQ ID NO: 31831 - RNA, 20 nt, Artificial Sequence
  RPE65 RNA guide
ugauauauuuuaguggagug

SEQ ID NO: 31832 - RNA, 20 nt, Artificial Sequence
  RPE65 RNA guide
ugaucuccuagugaagguga

SEQ ID NO: 31833 - RNA, 20 nt, Artificial Sequence
  RPE65 RNA guide
ugaugaaggggagacagaac

SEQ ID NO: 31834 - RNA, 20 nt, Artificial Sequence
  RPE65 RNA guide
ugauugggcagcuucuuccu

SEQ ID NO: 31835 - RNA, 20 nt, Artificial Sequence
  RPE65 RNA guide
ugauuuucauuuccagcccu

SEQ ID NO: 31836 - RNA, 20 nt, Artificial Sequence
  RPE65 RNA guide
ugccagcucuaugaggaaga

SEQ ID NO: 31837 - RNA, 20 nt, Artificial Sequence
  RPE65 RNA guide
ugcccaaucaggcugcugau

SEQ ID NO: 31838 - RNA, 20 nt, Artificial Sequence
  RPE65 RNA guide
ugccccagaguguggauaaa

SEQ ID NO: 31839 - RNA, 20 nt, Artificial Sequence
  RPE65 RNA guide
ugccuuaccaaggacaagcc

SEQ ID NO: 31840 - RNA, 20 nt, Artificial Sequence
  RPE65 RNA guide
ugccuugggcuaggcuuguc

SEQ ID NO: 31841 - RNA, 20 nt, Artificial Sequence
  RPE65 RNA guide
ugccuuuugccaucucauuu

SEQ ID NO: 31842 - RNA, 20 nt, Artificial Sequence
  RPE65 RNA guide
ugcugacuugacucaccuuc

SEQ ID NO: 31843 - RNA, 20 nt, Artificial Sequence
  RPE65 RNA guide
ugcugauauacucugccuua

SEQ ID NO: 31844 - RNA, 20 nt, Artificial Sequence
  RPE65 RNA guide
ugcuguccagcgcgagggcu

SEQ ID NO: 31845 - RNA, 20 nt, Artificial Sequence
  RPE65 RNA guide
ugcuucucccucacuccuuc

SEQ ID NO: 31846 - RNA, 20 nt, Artificial Sequence
  RPE65 RNA guide
ugcuucuuaucccugccuug

SEQ ID NO: 31847 - RNA, 20 nt, Artificial Sequence
  RPE65 RNA guide
uggaaaugaaaaucacugcc

SEQ ID NO: 31848 - RNA, 20 nt, Artificial Sequence
  RPE65 RNA guide
uggaaggagugagggagaag

SEQ ID NO: 31849 - RNA, 20 nt, Artificial Sequence
  RPE65 RNA guide
uggacagcacuuagaaaaug

SEQ ID NO: 31850 - RNA, 20 nt, Artificial Sequence
  RPE65 RNA guide
uggagagucccaauccucuc

SEQ ID NO: 31851 - RNA, 20 nt, Artificial Sequence
  RPE65 RNA guide
uggagaugccccagagugug

SEQ ID NO: 31852 - RNA, 20 nt, Artificial Sequence
  RPE65 RNA guide
uggauaaaggguuggaagga

SEQ ID NO: 31853 - RNA, 20 nt, Artificial Sequence
  RPE65 RNA guide
uggauugguguuuggggaaa

SEQ ID NO: 31854 - RNA, 20 nt, Artificial Sequence
  RPE65 RNA guide
uggcaaaaggcaaauggauu

SEQ ID NO: 31855 - RNA, 20 nt, Artificial Sequence
  RPE65 RNA guide
uggcagugauuuucauuucc

SEQ ID NO: 31856 - RNA, 20 nt, Artificial Sequence
  RPE65 RNA guide
uggcucuuuaaaaucuagag

SEQ ID NO: 31857 - RNA, 20 nt, Artificial Sequence
  RPE65 RNA guide
ugggacucuccaccuaauag

SEQ ID NO: 31858 - RNA, 20 nt, Artificial Sequence
  RPE65 RNA guide
ugggcagcuucuuccucaua

SEQ ID NO: 31859 - RNA, 20 nt, Artificial Sequence
  RPE65 RNA guide
ugggcuaggcuuguccuugg

SEQ ID NO: 31860 - RNA, 20 nt, Artificial Sequence
  RPE65 RNA guide
uggggaaaucuauuaggugg

SEQ ID NO: 31861 - RNA, 20 nt, Artificial Sequence
  RPE65 RNA guide
ugguaaggcagaguauauca

SEQ ID NO: 31862 - RNA, 20 nt, Artificial Sequence
  RPE65 RNA guide
ugguguuuggggaaaucuau

SEQ ID NO: 31863 - RNA, 20 nt, Artificial Sequence
  RPE65 RNA guide
uguccagcgcgagggcugga

SEQ ID NO: 31864 - RNA, 20 nt, Artificial Sequence
  RPE65 RNA guide
uguccuugguaaggcagagu

SEQ ID NO: 31865 - RNA, 20 nt, Artificial Sequence
  RPE65 RNA guide
ugucugcugacuugacucac

SEQ ID NO: 31866 - RNA, 20 nt, Artificial Sequence
  RPE65 RNA guide
ugugaucuccuagugaaggu

SEQ ID NO: 31867 - RNA, 20 nt, Artificial Sequence
  RPE65 RNA guide
ugugaugaaggggagacaga

SEQ ID NO: 31868 - RNA, 20 nt, Artificial Sequence
  RPE65 RNA guide
uguggagaugccccagagug

SEQ ID NO: 31869 - RNA, 20 nt, Artificial Sequence
  RPE65 RNA guide
uguggauaaaggguuggaag

SEQ ID NO: 31870 - RNA, 20 nt, Artificial Sequence
  RPE65 RNA guide
uguucugucuccccuucauc

SEQ ID NO: 31871 - RNA, 20 nt, Artificial Sequence
  RPE65 RNA guide
uguuuggggaaaucuauuag

SEQ ID NO: 31872 - RNA, 20 nt, Artificial Sequence
  RPE65 RNA guide
uuaaaaaugagauggcaaaa

SEQ ID NO: 31873 - RNA, 20 nt, Artificial Sequence
  RPE65 RNA guide
uuaaagagccaggauuccug

SEQ ID NO: 31874 - RNA, 20 nt, Artificial Sequence
  RPE65 RNA guide
uuaccaaggacaagccuagc

SEQ ID NO: 31875 - RNA, 20 nt, Artificial Sequence
  RPE65 RNA guide
uuagaaaaugucugcugacu

SEQ ID NO: 31876 - RNA, 20 nt, Artificial Sequence
  RPE65 RNA guide
uuagguggagagucccaauc

SEQ ID NO: 31877 - RNA, 20 nt, Artificial Sequence
  RPE65 RNA guide
uuauccacacucuggggcau

SEQ ID NO: 31878 - RNA, 20 nt, Artificial Sequence
  RPE65 RNA guide
uuaucccugccuugggcuag

SEQ ID NO: 31879 - RNA, 20 nt, Artificial Sequence
  RPE65 RNA guide
uucacuaggagaucacaccu

SEQ ID NO: 31880 - RNA, 20 nt, Artificial Sequence
  RPE65 RNA guide
uucauuuccagcccucgcgc

SEQ ID NO: 31881 - RNA, 20 nt, Artificial Sequence
  RPE65 RNA guide
uuccaacccuuuauccacac

SEQ ID NO: 31882 - RNA, 20 nt, Artificial Sequence
  RPE65 RNA guide
uuccagcccucgcgcuggac

SEQ ID NO: 31883 - RNA, 20 nt, Artificial Sequence
  RPE65 RNA guide
uucccaaggugugaucuccu

SEQ ID NO: 31884 - RNA, 20 nt, Artificial Sequence
  RPE65 RNA guide
uuccccaaacaccaauccau

SEQ ID NO: 31885 - RNA, 20 nt, Artificial Sequence
  RPE65 RNA guide
uuccucauagagcuggcagu

SEQ ID NO: 31886 - RNA, 20 nt, Artificial Sequence
  RPE65 RNA guide
uucuaagugcuguccagcgc

SEQ ID NO: 31887 - RNA, 20 nt, Artificial Sequence
  RPE65 RNA guide
uucuacuccucacuccacua

SEQ ID NO: 31888 - RNA, 20 nt, Artificial Sequence
  RPE65 RNA guide
uucucccucacuccuuccaa

SEQ ID NO: 31889 - RNA, 20 nt, Artificial Sequence
  RPE65 RNA guide
uucuuaucccugccuugggc

SEQ ID NO: 31890 - RNA, 20 nt, Artificial Sequence
  RPE65 RNA guide
uucuuccucauagagcuggc

SEQ ID NO: 31891 - RNA, 20 nt, Artificial Sequence
  RPE65 RNA guide
uugacucaccuucacuagga

SEQ ID NO: 31892 - RNA, 20 nt, Artificial Sequence
  RPE65 RNA guide
uugagaggauugggacucuc

SEQ ID NO: 31893 - RNA, 20 nt, Artificial Sequence
  RPE65 RNA guide
uugauauauuuuaguggagu

SEQ ID NO: 31894 - RNA, 20 nt, Artificial Sequence
  RPE65 RNA guide
uugccuuuugccaucucauu

SEQ ID NO: 31895 - RNA, 20 nt, Artificial Sequence
  RPE65 RNA guide
uugcuucuuaucccugccuu

SEQ ID NO: 31896 - RNA, 20 nt, Artificial Sequence
  RPE65 RNA guide
uuggaaggagugagggagaa

SEQ ID NO: 31897 - RNA, 20 nt, Artificial Sequence
  RPE65 RNA guide
uugggacucuccaccuaaua

SEQ ID NO: 31898 - RNA, 20 nt, Artificial Sequence
  RPE65 RNA guide
uugggcagcuucuuccucau

SEQ ID NO: 31899 - RNA, 20 nt, Artificial Sequence
  RPE65 RNA guide
uugggcuaggcuuguccuug

SEQ ID NO: 31900 - RNA, 20 nt, Artificial Sequence
  RPE65 RNA guide
uuggggaaaucuauuaggug

SEQ ID NO: 31901 - RNA, 20 nt, Artificial Sequence
  RPE65 RNA guide
uugguaaggcagaguauauc

SEQ ID NO: 31902 - RNA, 20 nt, Artificial Sequence
  RPE65 RNA guide
uugguguuuggggaaaucua

SEQ ID NO: 31903 - RNA, 20 nt, Artificial Sequence
  RPE65 RNA guide
uuguccuugguaaggcagag

SEQ ID NO: 31904 - RNA, 20 nt, Artificial Sequence
  RPE65 RNA guide
uuuaaagagccaggauuccu

SEQ ID NO: 31905 - RNA, 20 nt, Artificial Sequence
  RPE65 RNA guide
uuuauccacacucuggggca

SEQ ID NO: 31906 - RNA, 20 nt, Artificial Sequence
  RPE65 RNA guide
uuucauuuccagcccucgcg

SEQ ID NO: 31907 - RNA, 20 nt, Artificial Sequence
  RPE65 RNA guide
uuuccagcccucgcgcugga

SEQ ID NO: 31908 - RNA, 20 nt, Artificial Sequence
  RPE65 RNA guide
uuucccaaggugugaucucc

SEQ ID NO: 31909 - RNA, 20 nt, Artificial Sequence
  RPE65 RNA guide
uuuccccaaacaccaaucca

SEQ ID NO: 31910 - RNA, 20 nt, Artificial Sequence
  RPE65 RNA guide
uuucuaagugcuguccagcg

SEQ ID NO: 31911 - RNA, 20 nt, Artificial Sequence
  RPE65 RNA guide
uuugccuuuugccaucucau

SEQ ID NO: 31912 - RNA, 20 nt, Artificial Sequence
  RPE65 RNA guide
uuuggggaaaucuauuaggu

SEQ ID NO: 31913 - RNA, 20 nt, Artificial Sequence
  RPE65 RNA guide
uuuuaaagagccaggauucc

SEQ ID NO: 31914 - RNA, 20 nt, Artificial Sequence
  RPE65 RNA guide
uuuuaguggagugaggagua

SEQ ID NO: 31915 - RNA, 20 nt, Artificial Sequence
  RPE65 RNA guide
uuuucauuuccagcccucgc

SEQ ID NO: 31916 - RNA, 20 nt, Artificial Sequence
  RPE65 RNA guide
uuuucuaagugcuguccagc

SEQ ID NO: 31917 - RNA, 21 nt, Artificial Sequence
  RPE65 RNA guide
aaaaaacaggaauccuggcuc

SEQ ID NO: 31918 - RNA, 21 nt, Artificial Sequence
  RPE65 RNA guide
aaaaacaggaauccuggcucu

SEQ ID NO: 31919 - RNA, 21 nt, Artificial Sequence
  RPE65 RNA guide
aaaaaugagauggcaaaaggc

SEQ ID NO: 31920 - RNA, 21 nt, Artificial Sequence
  RPE65 RNA guide
aaaacaggaauccuggcucuu

SEQ ID NO: 31921 - RNA, 21 nt, Artificial Sequence
  RPE65 RNA guide
aaaaggcaaauggauuggugu

SEQ ID NO: 31922 - RNA, 21 nt, Artificial Sequence
  RPE65 RNA guide
aaaaucacugccagcucuaug

SEQ ID NO: 31923 - RNA, 21 nt, Artificial Sequence
  RPE65 RNA guide
aaaaugagauggcaaaaggca

SEQ ID NO: 31924 - RNA, 21 nt, Artificial Sequence
  RPE65 RNA guide
aaaaugucugcugacuugacu

SEQ ID NO: 31925 - RNA, 21 nt, Artificial Sequence
  RPE65 RNA guide
aaacaccaauccauuugccuu

SEQ ID NO: 31926 - RNA, 21 nt, Artificial Sequence
  RPE65 RNA guide
aaacaggaauccuggcucuuu

SEQ ID NO: 31927 - RNA, 21 nt, Artificial Sequence
  RPE65 RNA guide
aaagagccaggauuccuguuu

SEQ ID NO: 31928 - RNA, 21 nt, Artificial Sequence
  RPE65 RNA guide
aaaggcaaauggauugguguu

SEQ ID NO: 31929 - RNA, 21 nt, Artificial Sequence
  RPE65 RNA guide
aaaggguuggaaggagugagg

SEQ ID NO: 31930 - RNA, 21 nt, Artificial Sequence
  RPE65 RNA guide
aaaucacugccagcucuauga

SEQ ID NO: 31931 - RNA, 21 nt, Artificial Sequence
  RPE65 RNA guide
aaaucuauuagguggagaguc

SEQ ID NO: 31932 - RNA, 21 nt, Artificial Sequence
  RPE65 RNA guide
aaaugaaaaaacaggaauccu

SEQ ID NO: 31933 - RNA, 21 nt, Artificial Sequence
  RPE65 RNA guide
aaaugaaaaucacugccagcu

SEQ ID NO: 31934 - RNA, 21 nt, Artificial Sequence
  RPE65 RNA guide
aaaugagauggcaaaaggcaa

SEQ ID NO: 31935 - RNA, 21 nt, Artificial Sequence
  RPE65 RNA guide
aaauggauugguguuugggga

SEQ ID NO: 31936 - RNA, 21 nt, Artificial Sequence
  RPE65 RNA guide
aaaugucugcugacuugacuc

SEQ ID NO: 31937 - RNA, 21 nt, Artificial Sequence
  RPE65 RNA guide
aacaccaauccauuugccuuu

SEQ ID NO: 31938 - RNA, 21 nt, Artificial Sequence
  RPE65 RNA guide
aacaggaauccuggcucuuua

SEQ ID NO: 31939 - RNA, 21 nt, Artificial Sequence
  RPE65 RNA guide
aacauugcuucuuaucccugc

SEQ ID NO: 31940 - RNA, 21 nt, Artificial Sequence
  RPE65 RNA guide
aacccuuuauccacacucugg

SEQ ID NO: 31941 - RNA, 21 nt, Artificial Sequence
  RPE65 RNA guide
aagaagcaauguucugucucc

SEQ ID NO: 31942 - RNA, 21 nt, Artificial Sequence
  RPE65 RNA guide
aagaagcugcccaaucaggcu

SEQ ID NO: 31943 - RNA, 21 nt, Artificial Sequence
  RPE65 RNA guide
aagagccaggauuccuguuuu

SEQ ID NO: 31944 - RNA, 21 nt, Artificial Sequence
  RPE65 RNA guide
aagaugcuucucccucacucc

SEQ ID NO: 31945 - RNA, 21 nt, Artificial Sequence
  RPE65 RNA guide
aagcaauguucugucuccccu

SEQ ID NO: 31946 - RNA, 21 nt, Artificial Sequence
  RPE65 RNA guide
aagcaucuugagaggauuggg

SEQ ID NO: 31947 - RNA, 21 nt, Artificial Sequence
  RPE65 RNA guide
aagccuagcccaaggcaggga

SEQ ID NO: 31948 - RNA, 21 nt, Artificial Sequence
  RPE65 RNA guide
aagcugcccaaucaggcugcu

SEQ ID NO: 31949 - RNA, 21 nt, Artificial Sequence
  RPE65 RNA guide
aaggacaagccuagcccaagg

SEQ ID NO: 31950 - RNA, 21 nt, Artificial Sequence
  RPE65 RNA guide
aaggagugagggagaagcauc

SEQ ID NO: 31951 - RNA, 21 nt, Artificial Sequence
  RPE65 RNA guide
aaggcaaauggauugguguuu

SEQ ID NO: 31952 - RNA, 21 nt, Artificial Sequence
  RPE65 RNA guide
aaggcagaguauaucagcagc

SEQ ID NO: 31953 - RNA, 21 nt, Artificial Sequence
  RPE65 RNA guide
aaggcagggauaagaagcaau

SEQ ID NO: 31954 - RNA, 21 nt, Artificial Sequence
  RPE65 RNA guide
aaggggagacagaacauugcu

SEQ ID NO: 31955 - RNA, 21 nt, Artificial Sequence
  RPE65 RNA guide
aaggguuggaaggagugaggg

SEQ ID NO: 31956 - RNA, 21 nt, Artificial Sequence
  RPE65 RNA guide
aaggugagucaagucagcaga

SEQ ID NO: 31957 - RNA, 21 nt, Artificial Sequence
  RPE65 RNA guide
aaggugugaucuccuagugaa

SEQ ID NO: 31958 - RNA, 21 nt, Artificial Sequence
  RPE65 RNA guide
aagucagcagacauuuucuaa

SEQ ID NO: 31959 - RNA, 21 nt, Artificial Sequence
  RPE65 RNA guide
aagugcuguccagcgcgaggg

SEQ ID NO: 31960 - RNA, 21 nt, Artificial Sequence
  RPE65 RNA guide
aauagauuuccccaaacacca

SEQ ID NO: 31961 - RNA, 21 nt, Artificial Sequence
  RPE65 RNA guide
aaucacugccagcucuaugag

SEQ ID NO: 31962 - RNA, 21 nt, Artificial Sequence
  RPE65 RNA guide
aaucaggcugcugauauacuc

SEQ ID NO: 31963 - RNA, 21 nt, Artificial Sequence
  RPE65 RNA guide
aauccauuugccuuuugccau

SEQ ID NO: 31964 - RNA, 21 nt, Artificial Sequence
  RPE65 RNA guide
aauccucucaagaugcuucuc

SEQ ID NO: 31965 - RNA, 21 nt, Artificial Sequence
  RPE65 RNA guide
aauccuggcucuuuaaaaucu

SEQ ID NO: 31966 - RNA, 21 nt, Artificial Sequence
  RPE65 RNA guide
aaucuauuagguggagagucc

SEQ ID NO: 31967 - RNA, 21 nt, Artificial Sequence
  RPE65 RNA guide
aaugaaaaaacaggaauccug

SEQ ID NO: 31968 - RNA, 21 nt, Artificial Sequence
  RPE65 RNA guide
aaugaaaaucacugccagcuc

SEQ ID NO: 31969 - RNA, 21 nt, Artificial Sequence
  RPE65 RNA guide
aaugagauggcaaaaggcaaa

SEQ ID NO: 31970 - RNA, 21 nt, Artificial Sequence
  RPE65 RNA guide
aauggauugguguuuggggaa

SEQ ID NO: 31971 - RNA, 21 nt, Artificial Sequence
  RPE65 RNA guide
aaugucugcugacuugacuca

SEQ ID NO: 31972 - RNA, 21 nt, Artificial Sequence
  RPE65 RNA guide
aauguucugucuccccuucau

SEQ ID NO: 31973 - RNA, 21 nt, Artificial Sequence
  RPE65 RNA guide
acaagccuagcccaaggcagg

SEQ ID NO: 31974 - RNA, 21 nt, Artificial Sequence
  RPE65 RNA guide
acaccaauccauuugccuuuu

SEQ ID NO: 31975 - RNA, 21 nt, Artificial Sequence
  RPE65 RNA guide
acagaacauugcuucuuaucc

SEQ ID NO: 31976 - RNA, 21 nt, Artificial Sequence
  RPE65 RNA guide
acagcacuuagaaaaugucug

SEQ ID NO: 31977 - RNA, 21 nt, Artificial Sequence
  RPE65 RNA guide
acaggaauccuggcucuuuaa

SEQ ID NO: 31978 - RNA, 21 nt, Artificial Sequence
  RPE65 RNA guide
acauugcuucuuaucccugcc

SEQ ID NO: 31979 - RNA, 21 nt, Artificial Sequence
  RPE65 RNA guide
acauuuucuaagugcugucca

SEQ ID NO: 31980 - RNA, 21 nt, Artificial Sequence
  RPE65 RNA guide
accaaggacaagccuagccca

SEQ ID NO: 31981 - RNA, 21 nt, Artificial Sequence
  RPE65 RNA guide
accaauccauuugccuuuugc

SEQ ID NO: 31982 - RNA, 21 nt, Artificial Sequence
  RPE65 RNA guide
acccuuuauccacacucuggg

SEQ ID NO: 31983 - RNA, 21 nt, Artificial Sequence
  RPE65 RNA guide
accuaauagauuuccccaaac

SEQ ID NO: 31984 - RNA, 21 nt, Artificial Sequence
  RPE65 RNA guide
accuucacuaggagaucacac

SEQ ID NO: 31985 - RNA, 21 nt, Artificial Sequence
  RPE65 RNA guide
acucaccuucacuaggagauc

SEQ ID NO: 31986 - RNA, 21 nt, Artificial Sequence
  RPE65 RNA guide
acuccucacuccacuaaaaua

SEQ ID NO: 31987 - RNA, 21 nt, Artificial Sequence
  RPE65 RNA guide
acuccuuccaacccuuuaucc

SEQ ID NO: 31988 - RNA, 21 nt, Artificial Sequence
  RPE65 RNA guide
acucuccaccuaauagauuuc

SEQ ID NO: 31989 - RNA, 21 nt, Artificial Sequence
  RPE65 RNA guide
acucugccuuaccaaggacaa

SEQ ID NO: 31990 - RNA, 21 nt, Artificial Sequence
  RPE65 RNA guide
acugccagcucuaugaggaag

SEQ ID NO: 31991 - RNA, 21 nt, Artificial Sequence
  RPE65 RNA guide
acuuagaaaaugucugcugac

SEQ ID NO: 31992 - RNA, 21 nt, Artificial Sequence
  RPE65 RNA guide
acuucuacuccucacuccacu

SEQ ID NO: 31993 - RNA, 21 nt, Artificial Sequence
  RPE65 RNA guide
acuugacucaccuucacuagg

SEQ ID NO: 31994 - RNA, 21 nt, Artificial Sequence
  RPE65 RNA guide
agaaaaugucugcugacuuga

SEQ ID NO: 31995 - RNA, 21 nt, Artificial Sequence
  RPE65 RNA guide
agaacauugcuucuuaucccu

SEQ ID NO: 31996 - RNA, 21 nt, Artificial Sequence
  RPE65 RNA guide
agaagcaauguucugucuccc

SEQ ID NO: 31997 - RNA, 21 nt, Artificial Sequence
  RPE65 RNA guide
agaagcaucuugagaggauug

SEQ ID NO: 31998 - RNA, 21 nt, Artificial Sequence
  RPE65 RNA guide
agaagcugcccaaucaggcug

SEQ ID NO: 31999 - RNA, 21 nt, Artificial Sequence
  RPE65 RNA guide
agacagaacauugcuucuuau

SEQ ID NO: 32000 - RNA, 21 nt, Artificial Sequence
  RPE65 RNA guide
agacauuuucuaagugcuguc

SEQ ID NO: 32001 - RNA, 21 nt, Artificial Sequence
  RPE65 RNA guide
agagccaggauuccuguuuuu

SEQ ID NO: 32002 - RNA, 21 nt, Artificial Sequence
  RPE65 RNA guide
agagcuggcagugauuuucau

SEQ ID NO: 32003 - RNA, 21 nt, Artificial Sequence
  RPE65 RNA guide
agaggauugggacucuccacc

SEQ ID NO: 32004 - RNA, 21 nt, Artificial Sequence
  RPE65 RNA guide
agaguauaucagcagccugau

SEQ ID NO: 32005 - RNA, 21 nt, Artificial Sequence
  RPE65 RNA guide
agagucccaauccucucaaga

SEQ ID NO: 32006 - RNA, 21 nt, Artificial Sequence
  RPE65 RNA guide
agaguguggauaaaggguugg

SEQ ID NO: 32007 - RNA, 21 nt, Artificial Sequence
  RPE65 RNA guide
agaugccccagaguguggaua

SEQ ID NO: 32008 - RNA, 21 nt, Artificial Sequence
  RPE65 RNA guide
agaugcuucucccucacuccu

SEQ ID NO: 32009 - RNA, 21 nt, Artificial Sequence
  RPE65 RNA guide
agauggcaaaaggcaaaugga

SEQ ID NO: 32010 - RNA, 21 nt, Artificial Sequence
  RPE65 RNA guide
agauuuccccaaacaccaauc

SEQ ID NO: 32011 - RNA, 21 nt, Artificial Sequence
  RPE65 RNA guide
agauuuuaaagagccaggauu

SEQ ID NO: 32012 - RNA, 21 nt, Artificial Sequence
  RPE65 RNA guide
agcaauguucugucuccccuu

SEQ ID NO: 32013 - RNA, 21 nt, Artificial Sequence
  RPE65 RNA guide
agcacuuagaaaaugucugcu

SEQ ID NO: 32014 - RNA, 21 nt, Artificial Sequence
  RPE65 RNA guide
agcagacauuuucuaagugcu

SEQ ID NO: 32015 - RNA, 21 nt, Artificial Sequence
  RPE65 RNA guide
agcagccugauugggcagcuu

SEQ ID NO: 32016 - RNA, 21 nt, Artificial Sequence
  RPE65 RNA guide
agcaucuugagaggauuggga

SEQ ID NO: 32017 - RNA, 21 nt, Artificial Sequence
  RPE65 RNA guide
agccaggauuccuguuuuuuc

SEQ ID NO: 32018 - RNA, 21 nt, Artificial Sequence
  RPE65 RNA guide
agcccaaggcagggauaagaa

SEQ ID NO: 32019 - RNA, 21 nt, Artificial Sequence
  RPE65 RNA guide
agcccucgcgcuggacagcac

SEQ ID NO: 32020 - RNA, 21 nt, Artificial Sequence
  RPE65 RNA guide
agccuagcccaaggcagggau

SEQ ID NO: 32021 - RNA, 21 nt, Artificial Sequence
  RPE65 RNA guide
agccugauugggcagcuucuu

SEQ ID NO: 32022 - RNA, 21 nt, Artificial Sequence
  RPE65 RNA guide
agcgcgagggcuggaaaugaa

SEQ ID NO: 32023 - RNA, 21 nt, Artificial Sequence
  RPE65 RNA guide
agcucuagauuuuaaagagcc

SEQ ID NO: 32024 - RNA, 21 nt, Artificial Sequence
  RPE65 RNA guide
agcucuaugaggaagaagcug

SEQ ID NO: 32025 - RNA, 21 nt, Artificial Sequence
  RPE65 RNA guide
agcugcccaaucaggcugcug

SEQ ID NO: 32026 - RNA, 21 nt, Artificial Sequence
  RPE65 RNA guide
agcuggcagugauuuucauuu

SEQ ID NO: 32027 - RNA, 21 nt, Artificial Sequence
  RPE65 RNA guide
agcuucuuccucauagagcug

SEQ ID NO: 32028 - RNA, 21 nt, Artificial Sequence
  RPE65 RNA guide
aggaagaagcugcccaaucag

SEQ ID NO: 32029 - RNA, 21 nt, Artificial Sequence
  RPE65 RNA guide
aggaauccuggcucuuuaaaa

SEQ ID NO: 32030 - RNA, 21 nt, Artificial Sequence
  RPE65 RNA guide
aggacaagccuagcccaaggc

SEQ ID NO: 32031 - RNA, 21 nt, Artificial Sequence
  RPE65 RNA guide
aggagugagggagaagcaucu

SEQ ID NO: 32032 - RNA, 21 nt, Artificial Sequence
  RPE65 RNA guide
aggauugggacucuccaccua

SEQ ID NO: 32033 - RNA, 21 nt, Artificial Sequence
  RPE65 RNA guide
aggcaaauggauugguguuug

SEQ ID NO: 32034 - RNA, 21 nt, Artificial Sequence
  RPE65 RNA guide
aggcagaguauaucagcagcc

SEQ ID NO: 32035 - RNA, 21 nt, Artificial Sequence
  RPE65 RNA guide
aggcagggauaagaagcaaug

SEQ ID NO: 32036 - RNA, 21 nt, Artificial Sequence
  RPE65 RNA guide
aggcugcugauauacucugcc

SEQ ID NO: 32037 - RNA, 21 nt, Artificial Sequence
  RPE65 RNA guide
aggcuuguccuugguaaggca

SEQ ID NO: 32038 - RNA, 21 nt, Artificial Sequence
  RPE65 RNA guide
agggagaagcaucuugagagg

SEQ ID NO: 32039 - RNA, 21 nt, Artificial Sequence
  RPE65 RNA guide
agggauaagaagcaauguucu

SEQ ID NO: 32040 - RNA, 21 nt, Artificial Sequence
  RPE65 RNA guide
agggcuggaaaugaaaaucac

SEQ ID NO: 32041 - RNA, 21 nt, Artificial Sequence
  RPE65 RNA guide
aggggagacagaacauugcuu

SEQ ID NO: 32042 - RNA, 21 nt, Artificial Sequence
  RPE65 RNA guide
aggguuggaaggagugaggga

SEQ ID NO: 32043 - RNA, 21 nt, Artificial Sequence
  RPE65 RNA guide
aggugagucaagucagcagac

SEQ ID NO: 32044 - RNA, 21 nt, Artificial Sequence
  RPE65 RNA guide
agguggagagucccaauccuc

SEQ ID NO: 32045 - RNA, 21 nt, Artificial Sequence
  RPE65 RNA guide
aggugugaucuccuagugaag

SEQ ID NO: 32046 - RNA, 21 nt, Artificial Sequence
  RPE65 RNA guide
aguauaucagcagccugauug

SEQ ID NO: 32047 - RNA, 21 nt, Artificial Sequence
  RPE65 RNA guide
agucaagucagcagacauuuu

SEQ ID NO: 32048 - RNA, 21 nt, Artificial Sequence
  RPE65 RNA guide
agucagcagacauuuucuaag

SEQ ID NO: 32049 - RNA, 21 nt, Artificial Sequence
  RPE65 RNA guide
agucccaauccucucaagaug

SEQ ID NO: 32050 - RNA, 21 nt, Artificial Sequence
  RPE65 RNA guide
agugaaggugagucaagucag

SEQ ID NO: 32051 - RNA, 21 nt, Artificial Sequence
  RPE65 RNA guide
agugagggagaagcaucuuga

SEQ ID NO: 32052 - RNA, 21 nt, Artificial Sequence
  RPE65 RNA guide
agugauuuucauuuccagccc

SEQ ID NO: 32053 - RNA, 21 nt, Artificial Sequence
  RPE65 RNA guide
agugcuguccagcgcgagggc

SEQ ID NO: 32054 - RNA, 21 nt, Artificial Sequence
  RPE65 RNA guide
aguguggauaaaggguuggaa

SEQ ID NO: 32055 - RNA, 21 nt, Artificial Sequence
  RPE65 RNA guide
auaaaggguuggaaggaguga

SEQ ID NO: 32056 - RNA, 21 nt, Artificial Sequence
  RPE65 RNA guide
auaagaagcaauguucugucu

SEQ ID NO: 32057 - RNA, 21 nt, Artificial Sequence
  RPE65 RNA guide
auacucugccuuaccaaggac

SEQ ID NO: 32058 - RNA, 21 nt, Artificial Sequence
  RPE65 RNA guide
auagagcuggcagugauuuuc

SEQ ID NO: 32059 - RNA, 21 nt, Artificial Sequence
  RPE65 RNA guide
auagauuuccccaaacaccaa

SEQ ID NO: 32060 - RNA, 21 nt, Artificial Sequence
  RPE65 RNA guide
auagcucuagauuuuaaagag

SEQ ID NO: 32061 - RNA, 21 nt, Artificial Sequence
  RPE65 RNA guide
auauacucugccuuaccaagg

SEQ ID NO: 32062 - RNA, 21 nt, Artificial Sequence
  RPE65 RNA guide
auauauuuuaguggagugagg

SEQ ID NO: 32063 - RNA, 21 nt, Artificial Sequence
  RPE65 RNA guide
auaucagcagccugauugggc

SEQ ID NO: 32064 - RNA, 21 nt, Artificial Sequence
  RPE65 RNA guide
auauuuuaguggagugaggag

SEQ ID NO: 32065 - RNA, 21 nt, Artificial Sequence
  RPE65 RNA guide
aucacugccagcucuaugagg

SEQ ID NO: 32066 - RNA, 21 nt, Artificial Sequence
  RPE65 RNA guide
aucagcagccugauugggcag

SEQ ID NO: 32067 - RNA, 21 nt, Artificial Sequence
  RPE65 RNA guide
aucaggcugcugauauacucu

SEQ ID NO: 32068 - RNA, 21 nt, Artificial Sequence
  RPE65 RNA guide
auccauuugccuuuugccauc

SEQ ID NO: 32069 - RNA, 21 nt, Artificial Sequence
  RPE65 RNA guide
aucccugccuugggcuaggcu

SEQ ID NO: 32070 - RNA, 21 nt, Artificial Sequence
  RPE65 RNA guide
auccucucaagaugcuucucc

SEQ ID NO: 32071 - RNA, 21 nt, Artificial Sequence
  RPE65 RNA guide
auccuggcucuuuaaaaucua

SEQ ID NO: 32072 - RNA, 21 nt, Artificial Sequence
  RPE65 RNA guide
aucuauuagguggagaguccc

SEQ ID NO: 32073 - RNA, 21 nt, Artificial Sequence
  RPE65 RNA guide
aucuccuagugaaggugaguc

SEQ ID NO: 32074 - RNA, 21 nt, Artificial Sequence
  RPE65 RNA guide
aucuugagaggauugggacuc

SEQ ID NO: 32075 - RNA, 21 nt, Artificial Sequence
  RPE65 RNA guide
augaaaaaacaggaauccugg

SEQ ID NO: 32076 - RNA, 21 nt, Artificial Sequence
  RPE65 RNA guide
augaaaaucacugccagcucu

SEQ ID NO: 32077 - RNA, 21 nt, Artificial Sequence
  RPE65 RNA guide
augaaggggagacagaacauu

SEQ ID NO: 32078 - RNA, 21 nt, Artificial Sequence
  RPE65 RNA guide
augagauggcaaaaggcaaau

SEQ ID NO: 32079 - RNA, 21 nt, Artificial Sequence
  RPE65 RNA guide
augaggaagaagcugcccaau

SEQ ID NO: 32080 - RNA, 21 nt, Artificial Sequence
  RPE65 RNA guide
augccccagaguguggauaaa

SEQ ID NO: 32081 - RNA, 21 nt, Artificial Sequence
  RPE65 RNA guide
augcuucucccucacuccuuc

SEQ ID NO: 32082 - RNA, 21 nt, Artificial Sequence
  RPE65 RNA guide
auggauugguguuuggggaaa

SEQ ID NO: 32083 - RNA, 21 nt, Artificial Sequence
  RPE65 RNA guide
auggcaaaaggcaaauggauu

SEQ ID NO: 32084 - RNA, 21 nt, Artificial Sequence
  RPE65 RNA guide
augucugcugacuugacucac

SEQ ID NO: 32085 - RNA, 21 nt, Artificial Sequence
  RPE65 RNA guide
auguucugucuccccuucauc

SEQ ID NO: 32086 - RNA, 21 nt, Artificial Sequence
  RPE65 RNA guide
auuagguggagagucccaauc

SEQ ID NO: 32087 - RNA, 21 nt, Artificial Sequence
  RPE65 RNA guide
auugcuucuuaucccugccuu

SEQ ID NO: 32088 - RNA, 21 nt, Artificial Sequence
  RPE65 RNA guide
auugggacucuccaccuaaua

SEQ ID NO: 32089 - RNA, 21 nt, Artificial Sequence
  RPE65 RNA guide
auugggcagcuucuuccucau

SEQ ID NO: 32090 - RNA, 21 nt, Artificial Sequence
  RPE65 RNA guide
auugguguuuggggaaaucua

SEQ ID NO: 32091 - RNA, 21 nt, Artificial Sequence
  RPE65 RNA guide
auuuccagcccucgcgcugga

SEQ ID NO: 32092 - RNA, 21 nt, Artificial Sequence
  RPE65 RNA guide
auuucccaaggugugaucucc

SEQ ID NO: 32093 - RNA, 21 nt, Artificial Sequence
  RPE65 RNA guide
auuuccccaaacaccaaucca

SEQ ID NO: 32094 - RNA, 21 nt, Artificial Sequence
  RPE65 RNA guide
auuugccuuuugccaucucau

SEQ ID NO: 32095 - RNA, 21 nt, Artificial Sequence
  RPE65 RNA guide
auuuuaaagagccaggauucc

SEQ ID NO: 32096 - RNA, 21 nt, Artificial Sequence
  RPE65 RNA guide
auuuuaguggagugaggagua

SEQ ID NO: 32097 - RNA, 21 nt, Artificial Sequence
  RPE65 RNA guide
auuuucauuuccagcccucgc

SEQ ID NO: 32098 - RNA, 21 nt, Artificial Sequence
  RPE65 RNA guide
auuuucuaagugcuguccagc

SEQ ID NO: 32099 - RNA, 21 nt, Artificial Sequence
  RPE65 RNA guide
caaaaggcaaauggauuggug

SEQ ID NO: 32100 - RNA, 21 nt, Artificial Sequence
  RPE65 RNA guide
caaacaccaauccauuugccu

SEQ ID NO: 32101 - RNA, 21 nt, Artificial Sequence
  RPE65 RNA guide
caaauggauugguguuugggg

SEQ ID NO: 32102 - RNA, 21 nt, Artificial Sequence
  RPE65 RNA guide
caacccuuuauccacacucug

SEQ ID NO: 32103 - RNA, 21 nt, Artificial Sequence
  RPE65 RNA guide
caagaugcuucucccucacuc

SEQ ID NO: 32104 - RNA, 21 nt, Artificial Sequence
  RPE65 RNA guide
caagccuagcccaaggcaggg

SEQ ID NO: 32105 - RNA, 21 nt, Artificial Sequence
  RPE65 RNA guide
caaggacaagccuagcccaag

SEQ ID NO: 32106 - RNA, 21 nt, Artificial Sequence
  RPE65 RNA guide
caaggcagggauaagaagcaa

SEQ ID NO: 32107 - RNA, 21 nt, Artificial Sequence
  RPE65 RNA guide
caaggugugaucuccuaguga

SEQ ID NO: 32108 - RNA, 21 nt, Artificial Sequence
  RPE65 RNA guide
caagucagcagacauuuucua

SEQ ID NO: 32109 - RNA, 21 nt, Artificial Sequence
  RPE65 RNA guide
caaucaggcugcugauauacu

SEQ ID NO: 32110 - RNA, 21 nt, Artificial Sequence
  RPE65 RNA guide
caauccauuugccuuuugcca

SEQ ID NO: 32111 - RNA, 21 nt, Artificial Sequence
  RPE65 RNA guide
caauccucucaagaugcuucu

SEQ ID NO: 32112 - RNA, 21 nt, Artificial Sequence
  RPE65 RNA guide
caauguucugucuccccuuca

SEQ ID NO: 32113 - RNA, 21 nt, Artificial Sequence
  RPE65 RNA guide
caccaauccauuugccuuuug

SEQ ID NO: 32114 - RNA, 21 nt, Artificial Sequence
  RPE65 RNA guide
caccuaauagauuuccccaaa

SEQ ID NO: 32115 - RNA, 21 nt, Artificial Sequence
  RPE65 RNA guide
caccuucacuaggagaucaca

SEQ ID NO: 32116 - RNA, 21 nt, Artificial Sequence
  RPE65 RNA guide
cacuaggagaucacaccuugg

SEQ ID NO: 32117 - RNA, 21 nt, Artificial Sequence
  RPE65 RNA guide
cacuccuuccaacccuuuauc

SEQ ID NO: 32118 - RNA, 21 nt, Artificial Sequence
  RPE65 RNA guide
cacugccagcucuaugaggaa

SEQ ID NO: 32119 - RNA, 21 nt, Artificial Sequence
  RPE65 RNA guide
cacuuagaaaaugucugcuga

SEQ ID NO: 32120 - RNA, 21 nt, Artificial Sequence
  RPE65 RNA guide
cagaacauugcuucuuauccc

SEQ ID NO: 32121 - RNA, 21 nt, Artificial Sequence
  RPE65 RNA guide
cagacauuuucuaagugcugu

SEQ ID NO: 32122 - RNA, 21 nt, Artificial Sequence
  RPE65 RNA guide
cagaguauaucagcagccuga

SEQ ID NO: 32123 - RNA, 21 nt, Artificial Sequence
  RPE65 RNA guide
cagaguguggauaaaggguug

SEQ ID NO: 32124 - RNA, 21 nt, Artificial Sequence
  RPE65 RNA guide
cagcacuuagaaaaugucugc

SEQ ID NO: 32125 - RNA, 21 nt, Artificial Sequence
  RPE65 RNA guide
cagcagacauuuucuaagugc

SEQ ID NO: 32126 - RNA, 21 nt, Artificial Sequence
  RPE65 RNA guide
cagcagccugauugggcagcu

SEQ ID NO: 32127 - RNA, 21 nt, Artificial Sequence
  RPE65 RNA guide
cagcccucgcgcuggacagca

SEQ ID NO: 32128 - RNA, 21 nt, Artificial Sequence
  RPE65 RNA guide
cagccugauugggcagcuucu

SEQ ID NO: 32129 - RNA, 21 nt, Artificial Sequence
  RPE65 RNA guide
cagcgcgagggcuggaaauga

SEQ ID NO: 32130 - RNA, 21 nt, Artificial Sequence
  RPE65 RNA guide
cagcucuaugaggaagaagcu

SEQ ID NO: 32131 - RNA, 21 nt, Artificial Sequence
  RPE65 RNA guide
cagcuucuuccucauagagcu

SEQ ID NO: 32132 - RNA, 21 nt, Artificial Sequence
  RPE65 RNA guide
caggaauccuggcucuuuaaa

SEQ ID NO: 32133 - RNA, 21 nt, Artificial Sequence
  RPE65 RNA guide
caggcugcugauauacucugc

SEQ ID NO: 32134 - RNA, 21 nt, Artificial Sequence
  RPE65 RNA guide
cagggauaagaagcaauguuc

SEQ ID NO: 32135 - RNA, 21 nt, Artificial Sequence
  RPE65 RNA guide
cagugauuuucauuuccagcc

SEQ ID NO: 32136 - RNA, 21 nt, Artificial Sequence
  RPE65 RNA guide
cauagagcuggcagugauuuu

SEQ ID NO: 32137 - RNA, 21 nt, Artificial Sequence
  RPE65 RNA guide
caucuugagaggauugggacu

SEQ ID NO: 32138 - RNA, 21 nt, Artificial Sequence
  RPE65 RNA guide
cauugcuucuuaucccugccu

SEQ ID NO: 32139 - RNA, 21 nt, Artificial Sequence
  RPE65 RNA guide
cauuuccagcccucgcgcugg

SEQ ID NO: 32140 - RNA, 21 nt, Artificial Sequence
  RPE65 RNA guide
cauuugccuuuugccaucuca

SEQ ID NO: 32141 - RNA, 21 nt, Artificial Sequence
  RPE65 RNA guide
cauuuucuaagugcuguccag

SEQ ID NO: 32142 - RNA, 21 nt, Artificial Sequence
  RPE65 RNA guide
ccaaacaccaauccauuugcc

SEQ ID NO: 32143 - RNA, 21 nt, Artificial Sequence
  RPE65 RNA guide
ccaacccuuuauccacacucu

SEQ ID NO: 32144 - RNA, 21 nt, Artificial Sequence
  RPE65 RNA guide
ccaaggacaagccuagcccaa

SEQ ID NO: 32145 - RNA, 21 nt, Artificial Sequence
  RPE65 RNA guide
ccaaggcagggauaagaagca

SEQ ID NO: 32146 - RNA, 21 nt, Artificial Sequence
  RPE65 RNA guide
ccaaggugugaucuccuagug

SEQ ID NO: 32147 - RNA, 21 nt, Artificial Sequence
  RPE65 RNA guide
ccaaucaggcugcugauauac

SEQ ID NO: 32148 - RNA, 21 nt, Artificial Sequence
  RPE65 RNA guide
ccaauccauuugccuuuugcc

SEQ ID NO: 32149 - RNA, 21 nt, Artificial Sequence
  RPE65 RNA guide
ccaauccucucaagaugcuuc

SEQ ID NO: 32150 - RNA, 21 nt, Artificial Sequence
  RPE65 RNA guide
ccaccuaauagauuuccccaa

SEQ ID NO: 32151 - RNA, 21 nt, Artificial Sequence
  RPE65 RNA guide
ccagaguguggauaaaggguu

SEQ ID NO: 32152 - RNA, 21 nt, Artificial Sequence
  RPE65 RNA guide
ccagcccucgcgcuggacagc

SEQ ID NO: 32153 - RNA, 21 nt, Artificial Sequence
  RPE65 RNA guide
ccagcgcgagggcuggaaaug

SEQ ID NO: 32154 - RNA, 21 nt, Artificial Sequence
  RPE65 RNA guide
ccagcucuaugaggaagaagc

SEQ ID NO: 32155 - RNA, 21 nt, Artificial Sequence
  RPE65 RNA guide
ccaggauuccuguuuuuucau

SEQ ID NO: 32156 - RNA, 21 nt, Artificial Sequence
  RPE65 RNA guide
ccauuugccuuuugccaucuc

SEQ ID NO: 32157 - RNA, 21 nt, Artificial Sequence
  RPE65 RNA guide
cccaaacaccaauccauuugc

SEQ ID NO: 32158 - RNA, 21 nt, Artificial Sequence
  RPE65 RNA guide
cccaaggcagggauaagaagc

SEQ ID NO: 32159 - RNA, 21 nt, Artificial Sequence
  RPE65 RNA guide
cccaaggugugaucuccuagu

SEQ ID NO: 32160 - RNA, 21 nt, Artificial Sequence
  RPE65 RNA guide
cccaaucaggcugcugauaua

SEQ ID NO: 32161 - RNA, 21 nt, Artificial Sequence
  RPE65 RNA guide
cccaauccucucaagaugcuu

SEQ ID NO: 32162 - RNA, 21 nt, Artificial Sequence
  RPE65 RNA guide
cccagaguguggauaaagggu

SEQ ID NO: 32163 - RNA, 21 nt, Artificial Sequence
  RPE65 RNA guide
ccccaaacaccaauccauuug

SEQ ID NO: 32164 - RNA, 21 nt, Artificial Sequence
  RPE65 RNA guide
ccccagaguguggauaaaggg

SEQ ID NO: 32165 - RNA, 21 nt, Artificial Sequence
  RPE65 RNA guide
cccucacuccuuccaacccuu

SEQ ID NO: 32166 - RNA, 21 nt, Artificial Sequence
  RPE65 RNA guide
cccucgcgcuggacagcacuu

SEQ ID NO: 32167 - RNA, 21 nt, Artificial Sequence
  RPE65 RNA guide
cccugccuugggcuaggcuug

SEQ ID NO: 32168 - RNA, 21 nt, Artificial Sequence
  RPE65 RNA guide
cccuuuauccacacucugggg

SEQ ID NO: 32169 - RNA, 21 nt, Artificial Sequence
  RPE65 RNA guide
ccuaauagauuuccccaaaca

SEQ ID NO: 32170 - RNA, 21 nt, Artificial Sequence
  RPE65 RNA guide
ccuagcccaaggcagggauaa

SEQ ID NO: 32171 - RNA, 21 nt, Artificial Sequence
  RPE65 RNA guide
ccuagugaaggugagucaagu

SEQ ID NO: 32172 - RNA, 21 nt, Artificial Sequence
  RPE65 RNA guide
ccucacuccacuaaaauauau

SEQ ID NO: 32173 - RNA, 21 nt, Artificial Sequence
  RPE65 RNA guide
ccucacuccuuccaacccuuu

SEQ ID NO: 32174 - RNA, 21 nt, Artificial Sequence
  RPE65 RNA guide
ccucauagagcuggcagugau

SEQ ID NO: 32175 - RNA, 21 nt, Artificial Sequence
  RPE65 RNA guide
ccucgcgcuggacagcacuua

SEQ ID NO: 32176 - RNA, 21 nt, Artificial Sequence
  RPE65 RNA guide
ccucucaagaugcuucucccu

SEQ ID NO: 32177 - RNA, 21 nt, Artificial Sequence
  RPE65 RNA guide
ccugauugggcagcuucuucc

SEQ ID NO: 32178 - RNA, 21 nt, Artificial Sequence
  RPE65 RNA guide
ccugccuugggcuaggcuugu

SEQ ID NO: 32179 - RNA, 21 nt, Artificial Sequence
  RPE65 RNA guide
ccuggcucuuuaaaaucuaga

SEQ ID NO: 32180 - RNA, 21 nt, Artificial Sequence
  RPE65 RNA guide
ccuuaccaaggacaagccuag

SEQ ID NO: 32181 - RNA, 21 nt, Artificial Sequence
  RPE65 RNA guide
ccuucacuaggagaucacacc

SEQ ID NO: 32182 - RNA, 21 nt, Artificial Sequence
  RPE65 RNA guide
ccuuccaacccuuuauccaca

SEQ ID NO: 32183 - RNA, 21 nt, Artificial Sequence
  RPE65 RNA guide
ccuugggcuaggcuuguccuu

SEQ ID NO: 32184 - RNA, 21 nt, Artificial Sequence
  RPE65 RNA guide
ccuugguaaggcagaguauau

SEQ ID NO: 32185 - RNA, 21 nt, Artificial Sequence
  RPE65 RNA guide
ccuuuauccacacucuggggc

SEQ ID NO: 32186 - RNA, 21 nt, Artificial Sequence
  RPE65 RNA guide
ccuuuugccaucucauuuuua

SEQ ID NO: 32187 - RNA, 21 nt, Artificial Sequence
  RPE65 RNA guide
cgagggcuggaaaugaaaauc

SEQ ID NO: 32188 - RNA, 21 nt, Artificial Sequence
  RPE65 RNA guide
cgcgagggcuggaaaugaaaa

SEQ ID NO: 32189 - RNA, 21 nt, Artificial Sequence
  RPE65 RNA guide
cgcgcuggacagcacuuagaa

SEQ ID NO: 32190 - RNA, 21 nt, Artificial Sequence
  RPE65 RNA guide
cgcuggacagcacuuagaaaa

SEQ ID NO: 32191 - RNA, 21 nt, Artificial Sequence
  RPE65 RNA guide
cuaagugcuguccagcgcgag

SEQ ID NO: 32192 - RNA, 21 nt, Artificial Sequence
  RPE65 RNA guide
cuaauagauuuccccaaacac

SEQ ID NO: 32193 - RNA, 21 nt, Artificial Sequence
  RPE65 RNA guide
cuacuccucacuccacuaaaa

SEQ ID NO: 32194 - RNA, 21 nt, Artificial Sequence
  RPE65 RNA guide
cuagauuuuaaagagccagga

SEQ ID NO: 32195 - RNA, 21 nt, Artificial Sequence
  RPE65 RNA guide
cuagcccaaggcagggauaag

SEQ ID NO: 32196 - RNA, 21 nt, Artificial Sequence
  RPE65 RNA guide
cuaggcuuguccuugguaagg

SEQ ID NO: 32197 - RNA, 21 nt, Artificial Sequence
  RPE65 RNA guide
cuagugaaggugagucaaguc

SEQ ID NO: 32198 - RNA, 21 nt, Artificial Sequence
  RPE65 RNA guide
cuaugaggaagaagcugccca

SEQ ID NO: 32199 - RNA, 21 nt, Artificial Sequence
  RPE65 RNA guide
cuauuagguggagagucccaa

SEQ ID NO: 32200 - RNA, 21 nt, Artificial Sequence
  RPE65 RNA guide
cucaagaugcuucucccucac

SEQ ID NO: 32201 - RNA, 21 nt, Artificial Sequence
  RPE65 RNA guide
cucaccuucacuaggagauca

SEQ ID NO: 32202 - RNA, 21 nt, Artificial Sequence
  RPE65 RNA guide
cucacuccacuaaaauauauc

SEQ ID NO: 32203 - RNA, 21 nt, Artificial Sequence
  RPE65 RNA guide
cucacuccuuccaacccuuua

SEQ ID NO: 32204 - RNA, 21 nt, Artificial Sequence
  RPE65 RNA guide
cucauagagcuggcagugauu

SEQ ID NO: 32205 - RNA, 21 nt, Artificial Sequence
  RPE65 RNA guide
cuccaccuaauagauuucccc

SEQ ID NO: 32206 - RNA, 21 nt, Artificial Sequence
  RPE65 RNA guide
cucccucacuccuuccaaccc

SEQ ID NO: 32207 - RNA, 21 nt, Artificial Sequence
  RPE65 RNA guide
cuccuagugaaggugagucaa

SEQ ID NO: 32208 - RNA, 21 nt, Artificial Sequence
  RPE65 RNA guide
cuccucacuccacuaaaauau

SEQ ID NO: 32209 - RNA, 21 nt, Artificial Sequence
  RPE65 RNA guide
cuccuuccaacccuuuaucca

SEQ ID NO: 32210 - RNA, 21 nt, Artificial Sequence
  RPE65 RNA guide
cucgcgcuggacagcacuuag

SEQ ID NO: 32211 - RNA, 21 nt, Artificial Sequence
  RPE65 RNA guide
cucuagauuuuaaagagccag

SEQ ID NO: 32212 - RNA, 21 nt, Artificial Sequence
  RPE65 RNA guide
cucuaugaggaagaagcugcc

SEQ ID NO: 32213 - RNA, 21 nt, Artificial Sequence
  RPE65 RNA guide
cucucaagaugcuucucccuc

SEQ ID NO: 32214 - RNA, 21 nt, Artificial Sequence
  RPE65 RNA guide
cucuccaccuaauagauuucc

SEQ ID NO: 32215 - RNA, 21 nt, Artificial Sequence
  RPE65 RNA guide
cucugccuuaccaaggacaag

SEQ ID NO: 32216 - RNA, 21 nt, Artificial Sequence
  RPE65 RNA guide
cugacuugacucaccuucacu

SEQ ID NO: 32217 - RNA, 21 nt, Artificial Sequence
  RPE65 RNA guide
cugauauacucugccuuacca

SEQ ID NO: 32218 - RNA, 21 nt, Artificial Sequence
  RPE65 RNA guide
cugauugggcagcuucuuccu

SEQ ID NO: 32219 - RNA, 21 nt, Artificial Sequence
  RPE65 RNA guide
cugccagcucuaugaggaaga

SEQ ID NO: 32220 - RNA, 21 nt, Artificial Sequence
  RPE65 RNA guide
cugcccaaucaggcugcugau

SEQ ID NO: 32221 - RNA, 21 nt, Artificial Sequence
  RPE65 RNA guide
cugccuuaccaaggacaagcc

SEQ ID NO: 32222 - RNA, 21 nt, Artificial Sequence
  RPE65 RNA guide
cugccuugggcuaggcuuguc

SEQ ID NO: 32223 - RNA, 21 nt, Artificial Sequence
  RPE65 RNA guide
cugcugacuugacucaccuuc

SEQ ID NO: 32224 - RNA, 21 nt, Artificial Sequence
  RPE65 RNA guide
cugcugauauacucugccuua

SEQ ID NO: 32225 - RNA, 21 nt, Artificial Sequence
  RPE65 RNA guide
cuggaaaugaaaaucacugcc

SEQ ID NO: 32226 - RNA, 21 nt, Artificial Sequence
  RPE65 RNA guide
cuggacagcacuuagaaaaug

SEQ ID NO: 32227 - RNA, 21 nt, Artificial Sequence
  RPE65 RNA guide
cuggcagugauuuucauuucc

SEQ ID NO: 32228 - RNA, 21 nt, Artificial Sequence
  RPE65 RNA guide
cuggcucuuuaaaaucuagag

SEQ ID NO: 32229 - RNA, 21 nt, Artificial Sequence
  RPE65 RNA guide
cuguccagcgcgagggcugga

SEQ ID NO: 32230 - RNA, 21 nt, Artificial Sequence
  RPE65 RNA guide
cugugaugaaggggagacaga

SEQ ID NO: 32231 - RNA, 21 nt, Artificial Sequence
  RPE65 RNA guide
cuuaaaaaugagauggcaaaa

SEQ ID NO: 32232 - RNA, 21 nt, Artificial Sequence
  RPE65 RNA guide
cuuaccaaggacaagccuagc

SEQ ID NO: 32233 - RNA, 21 nt, Artificial Sequence
  RPE65 RNA guide
cuuagaaaaugucugcugacu

SEQ ID NO: 32234 - RNA, 21 nt, Artificial Sequence
  RPE65 RNA guide
cuuaucccugccuugggcuag

SEQ ID NO: 32235 - RNA, 21 nt, Artificial Sequence
  RPE65 RNA guide
cuucacuaggagaucacaccu

SEQ ID NO: 32236 - RNA, 21 nt, Artificial Sequence
  RPE65 RNA guide
cuuccaacccuuuauccacac

SEQ ID NO: 32237 - RNA, 21 nt, Artificial Sequence
  RPE65 RNA guide
cuuccucauagagcuggcagu

SEQ ID NO: 32238 - RNA, 21 nt, Artificial Sequence
  RPE65 RNA guide
cuucuacuccucacuccacua

SEQ ID NO: 32239 - RNA, 21 nt, Artificial Sequence
  RPE65 RNA guide
cuucucccucacuccuuccaa

SEQ ID NO: 32240 - RNA, 21 nt, Artificial Sequence
  RPE65 RNA guide
cuucuuaaaaaugagauggca

SEQ ID NO: 32241 - RNA, 21 nt, Artificial Sequence
  RPE65 RNA guide
cuucuuaucccugccuugggc

SEQ ID NO: 32242 - RNA, 21 nt, Artificial Sequence
  RPE65 RNA guide
cuucuuccucauagagcuggc

SEQ ID NO: 32243 - RNA, 21 nt, Artificial Sequence
  RPE65 RNA guide
cuugacucaccuucacuagga

SEQ ID NO: 32244 - RNA, 21 nt, Artificial Sequence
  RPE65 RNA guide
cuugagaggauugggacucuc

SEQ ID NO: 32245 - RNA, 21 nt, Artificial Sequence
  RPE65 RNA guide
cuugauauauuuuaguggagu

SEQ ID NO: 32246 - RNA, 21 nt, Artificial Sequence
  RPE65 RNA guide
cuugggcuaggcuuguccuug

SEQ ID NO: 32247 - RNA, 21 nt, Artificial Sequence
  RPE65 RNA guide
cuugguaaggcagaguauauc

SEQ ID NO: 32248 - RNA, 21 nt, Artificial Sequence
  RPE65 RNA guide
cuuguccuugguaaggcagag

SEQ ID NO: 32249 - RNA, 21 nt, Artificial Sequence
  RPE65 RNA guide
cuuuauccacacucuggggca

SEQ ID NO: 32250 - RNA, 21 nt, Artificial Sequence
  RPE65 RNA guide
cuuuugccaucucauuuuuaa

SEQ ID NO: 32251 - RNA, 21 nt, Artificial Sequence
  RPE65 RNA guide
gaaaaaacaggaauccuggcu

SEQ ID NO: 32252 - RNA, 21 nt, Artificial Sequence
  RPE65 RNA guide
gaaaaucacugccagcucuau

SEQ ID NO: 32253 - RNA, 21 nt, Artificial Sequence
  RPE65 RNA guide
gaaaaugucugcugacuugac

SEQ ID NO: 32254 - RNA, 21 nt, Artificial Sequence
  RPE65 RNA guide
gaaaucuauuagguggagagu

SEQ ID NO: 32255 - RNA, 21 nt, Artificial Sequence
  RPE65 RNA guide
gaaaugaaaaucacugccagc

SEQ ID NO: 32256 - RNA, 21 nt, Artificial Sequence
  RPE65 RNA guide
gaacauugcuucuuaucccug

SEQ ID NO: 32257 - RNA, 21 nt, Artificial Sequence
  RPE65 RNA guide
gaagaagcugcccaaucaggc

SEQ ID NO: 32258 - RNA, 21 nt, Artificial Sequence
  RPE65 RNA guide
gaagcaauguucugucucccc

SEQ ID NO: 32259 - RNA, 21 nt, Artificial Sequence
  RPE65 RNA guide
gaagcaucuugagaggauugg

SEQ ID NO: 32260 - RNA, 21 nt, Artificial Sequence
  RPE65 RNA guide
gaagcugcccaaucaggcugc

SEQ ID NO: 32261 - RNA, 21 nt, Artificial Sequence
  RPE65 RNA guide
gaaggagugagggagaagcau

SEQ ID NO: 32262 - RNA, 21 nt, Artificial Sequence
  RPE65 RNA guide
gaaggggagacagaacauugc

SEQ ID NO: 32263 - RNA, 21 nt, Artificial Sequence
  RPE65 RNA guide
gaaggugagucaagucagcag

SEQ ID NO: 32264 - RNA, 21 nt, Artificial Sequence
  RPE65 RNA guide
gaauccuggcucuuuaaaauc

SEQ ID NO: 32265 - RNA, 21 nt, Artificial Sequence
  RPE65 RNA guide
gacaagccuagcccaaggcag

SEQ ID NO: 32266 - RNA, 21 nt, Artificial Sequence
  RPE65 RNA guide
gacagaacauugcuucuuauc

SEQ ID NO: 32267 - RNA, 21 nt, Artificial Sequence
  RPE65 RNA guide
gacagcacuuagaaaaugucu

SEQ ID NO: 32268 - RNA, 21 nt, Artificial Sequence
  RPE65 RNA guide
gacauuuucuaagugcugucc

SEQ ID NO: 32269 - RNA, 21 nt, Artificial Sequence
  RPE65 RNA guide
gacucaccuucacuaggagau

SEQ ID NO: 32270 - RNA, 21 nt, Artificial Sequence
  RPE65 RNA guide
gacucuccaccuaauagauuu

SEQ ID NO: 32271 - RNA, 21 nt, Artificial Sequence
  RPE65 RNA guide
gacuugacucaccuucacuag

SEQ ID NO: 32272 - RNA, 21 nt, Artificial Sequence
  RPE65 RNA guide
gagaagcaucuugagaggauu

SEQ ID NO: 32273 - RNA, 21 nt, Artificial Sequence
  RPE65 RNA guide
gagacagaacauugcuucuua

SEQ ID NO: 32274 - RNA, 21 nt, Artificial Sequence
  RPE65 RNA guide
gagaggauugggacucuccac

SEQ ID NO: 32275 - RNA, 21 nt, Artificial Sequence
  RPE65 RNA guide
gagagucccaauccucucaag

SEQ ID NO: 32276 - RNA, 21 nt, Artificial Sequence
  RPE65 RNA guide
gagaugccccagaguguggau

SEQ ID NO: 32277 - RNA, 21 nt, Artificial Sequence
  RPE65 RNA guide
gagauggcaaaaggcaaaugg

SEQ ID NO: 32278 - RNA, 21 nt, Artificial Sequence
  RPE65 RNA guide
gagccaggauuccuguuuuuu

SEQ ID NO: 32279 - RNA, 21 nt, Artificial Sequence
  RPE65 RNA guide
gagcuggcagugauuuucauu

SEQ ID NO: 32280 - RNA, 21 nt, Artificial Sequence
  RPE65 RNA guide
gaggaagaagcugcccaauca

SEQ ID NO: 32281 - RNA, 21 nt, Artificial Sequence
  RPE65 RNA guide
gaggauugggacucuccaccu

SEQ ID NO: 32282 - RNA, 21 nt, Artificial Sequence
  RPE65 RNA guide
gagggagaagcaucuugagag

SEQ ID NO: 32283 - RNA, 21 nt, Artificial Sequence
  RPE65 RNA guide
gagggcuggaaaugaaaauca

SEQ ID NO: 32284 - RNA, 21 nt, Artificial Sequence
  RPE65 RNA guide
gaguauaucagcagccugauu

SEQ ID NO: 32285 - RNA, 21 nt, Artificial Sequence
  RPE65 RNA guide
gagucaagucagcagacauuu

SEQ ID NO: 32286 - RNA, 21 nt, Artificial Sequence
  RPE65 RNA guide
gagucccaauccucucaagau

SEQ ID NO: 32287 - RNA, 21 nt, Artificial Sequence
  RPE65 RNA guide
gagugagggagaagcaucuug

SEQ ID NO: 32288 - RNA, 21 nt, Artificial Sequence
  RPE65 RNA guide
gaguguggauaaaggguugga

SEQ ID NO: 32289 - RNA, 21 nt, Artificial Sequence
  RPE65 RNA guide
gauaaaggguuggaaggagug

SEQ ID NO: 32290 - RNA, 21 nt, Artificial Sequence
  RPE65 RNA guide
gauaagaagcaauguucuguc

SEQ ID NO: 32291 - RNA, 21 nt, Artificial Sequence
  RPE65 RNA guide
gauauacucugccuuaccaag

SEQ ID NO: 32292 - RNA, 21 nt, Artificial Sequence
  RPE65 RNA guide
gauauauuuuaguggagugag

SEQ ID NO: 32293 - RNA, 21 nt, Artificial Sequence
  RPE65 RNA guide
gaucuccuagugaaggugagu

SEQ ID NO: 32294 - RNA, 21 nt, Artificial Sequence
  RPE65 RNA guide
gaugaaggggagacagaacau

SEQ ID NO: 32295 - RNA, 21 nt, Artificial Sequence
  RPE65 RNA guide
gaugccccagaguguggauaa

SEQ ID NO: 32296 - RNA, 21 nt, Artificial Sequence
  RPE65 RNA guide
gaugcuucucccucacuccuu

SEQ ID NO: 32297 - RNA, 21 nt, Artificial Sequence
  RPE65 RNA guide
gauggcaaaaggcaaauggau

SEQ ID NO: 32298 - RNA, 21 nt, Artificial Sequence
  RPE65 RNA guide
gauugggacucuccaccuaau

SEQ ID NO: 32299 - RNA, 21 nt, Artificial Sequence
  RPE65 RNA guide
gauugggcagcuucuuccuca

SEQ ID NO: 32300 - RNA, 21 nt, Artificial Sequence
  RPE65 RNA guide
gauugguguuuggggaaaucu

SEQ ID NO: 32301 - RNA, 21 nt, Artificial Sequence
  RPE65 RNA guide
gauuuccccaaacaccaaucc

SEQ ID NO: 32302 - RNA, 21 nt, Artificial Sequence
  RPE65 RNA guide
gauuuuaaagagccaggauuc

SEQ ID NO: 32303 - RNA, 21 nt, Artificial Sequence
  RPE65 RNA guide
gauuuucauuuccagcccucg

SEQ ID NO: 32304 - RNA, 21 nt, Artificial Sequence
  RPE65 RNA guide
gcaaaaggcaaauggauuggu

SEQ ID NO: 32305 - RNA, 21 nt, Artificial Sequence
  RPE65 RNA guide
gcaaauggauugguguuuggg

SEQ ID NO: 32306 - RNA, 21 nt, Artificial Sequence
  RPE65 RNA guide
gcaauguucugucuccccuuc

SEQ ID NO: 32307 - RNA, 21 nt, Artificial Sequence
  RPE65 RNA guide
gcacuuagaaaaugucugcug

SEQ ID NO: 32308 - RNA, 21 nt, Artificial Sequence
  RPE65 RNA guide
gcagacauuuucuaagugcug

SEQ ID NO: 32309 - RNA, 21 nt, Artificial Sequence
  RPE65 RNA guide
gcagaguauaucagcagccug

SEQ ID NO: 32310 - RNA, 21 nt, Artificial Sequence
  RPE65 RNA guide
gcagccugauugggcagcuuc

SEQ ID NO: 32311 - RNA, 21 nt, Artificial Sequence
  RPE65 RNA guide
gcagcuucuuccucauagagc

SEQ ID NO: 32312 - RNA, 21 nt, Artificial Sequence
  RPE65 RNA guide
gcagggauaagaagcaauguu

SEQ ID NO: 32313 - RNA, 21 nt, Artificial Sequence
  RPE65 RNA guide
gcagugauuuucauuuccagc

SEQ ID NO: 32314 - RNA, 21 nt, Artificial Sequence
  RPE65 RNA guide
gcaucuugagaggauugggac

SEQ ID NO: 32315 - RNA, 21 nt, Artificial Sequence
  RPE65 RNA guide
gccagcucuaugaggaagaag

SEQ ID NO: 32316 - RNA, 21 nt, Artificial Sequence
  RPE65 RNA guide
gccaggauuccuguuuuuuca

SEQ ID NO: 32317 - RNA, 21 nt, Artificial Sequence
  RPE65 RNA guide
gcccaaggcagggauaagaag

SEQ ID NO: 32318 - RNA, 21 nt, Artificial Sequence
  RPE65 RNA guide
gcccaaucaggcugcugauau

SEQ ID NO: 32319 - RNA, 21 nt, Artificial Sequence
  RPE65 RNA guide
gccccagaguguggauaaagg

SEQ ID NO: 32320 - RNA, 21 nt, Artificial Sequence
  RPE65 RNA guide
gcccucgcgcuggacagcacu

SEQ ID NO: 32321 - RNA, 21 nt, Artificial Sequence
  RPE65 RNA guide
gccuagcccaaggcagggaua

SEQ ID NO: 32322 - RNA, 21 nt, Artificial Sequence
  RPE65 RNA guide
gccugauugggcagcuucuuc

SEQ ID NO: 32323 - RNA, 21 nt, Artificial Sequence
  RPE65 RNA guide
gccuuaccaaggacaagccua

SEQ ID NO: 32324 - RNA, 21 nt, Artificial Sequence
  RPE65 RNA guide
gccuugggcuaggcuuguccu

SEQ ID NO: 32325 - RNA, 21 nt, Artificial Sequence
  RPE65 RNA guide
gccuuuugccaucucauuuuu

SEQ ID NO: 32326 - RNA, 21 nt, Artificial Sequence
  RPE65 RNA guide
gcgagggcuggaaaugaaaau

SEQ ID NO: 32327 - RNA, 21 nt, Artificial Sequence
  RPE65 RNA guide
gcgcgagggcuggaaaugaaa

SEQ ID NO: 32328 - RNA, 21 nt, Artificial Sequence
  RPE65 RNA guide
gcgcuggacagcacuuagaaa

SEQ ID NO: 32329 - RNA, 21 nt, Artificial Sequence
  RPE65 RNA guide
gcuaggcuuguccuugguaag

SEQ ID NO: 32330 - RNA, 21 nt, Artificial Sequence
  RPE65 RNA guide
gcucuagauuuuaaagagcca

SEQ ID NO: 32331 - RNA, 21 nt, Artificial Sequence
  RPE65 RNA guide
gcucuaugaggaagaagcugc

SEQ ID NO: 32332 - RNA, 21 nt, Artificial Sequence
  RPE65 RNA guide
gcugacuugacucaccuucac

SEQ ID NO: 32333 - RNA, 21 nt, Artificial Sequence
  RPE65 RNA guide
gcugauauacucugccuuacc

SEQ ID NO: 32334 - RNA, 21 nt, Artificial Sequence
  RPE65 RNA guide
gcugcccaaucaggcugcuga

SEQ ID NO: 32335 - RNA, 21 nt, Artificial Sequence
  RPE65 RNA guide
gcugcugauauacucugccuu

SEQ ID NO: 32336 - RNA, 21 nt, Artificial Sequence
  RPE65 RNA guide
gcuggaaaugaaaaucacugc

SEQ ID NO: 32337 - RNA, 21 nt, Artificial Sequence
  RPE65 RNA guide
gcuggacagcacuuagaaaau

SEQ ID NO: 32338 - RNA, 21 nt, Artificial Sequence
  RPE65 RNA guide
gcuggcagugauuuucauuuc

SEQ ID NO: 32339 - RNA, 21 nt, Artificial Sequence
  RPE65 RNA guide
gcuguccagcgcgagggcugg

SEQ ID NO: 32340 - RNA, 21 nt, Artificial Sequence
  RPE65 RNA guide
gcuucucccucacuccuucca

SEQ ID NO: 32341 - RNA, 21 nt, Artificial Sequence
  RPE65 RNA guide
gcuucuuaucccugccuuggg

SEQ ID NO: 32342 - RNA, 21 nt, Artificial Sequence
  RPE65 RNA guide
gcuucuuccucauagagcugg

SEQ ID NO: 32343 - RNA, 21 nt, Artificial Sequence
  RPE65 RNA guide
gcuuguccuugguaaggcaga

SEQ ID NO: 32344 - RNA, 21 nt, Artificial Sequence
  RPE65 RNA guide
ggaaaucuauuagguggagag

SEQ ID NO: 32345 - RNA, 21 nt, Artificial Sequence
  RPE65 RNA guide
ggaaaugaaaaucacugccag

SEQ ID NO: 32346 - RNA, 21 nt, Artificial Sequence
  RPE65 RNA guide
ggaagaagcugcccaaucagg

SEQ ID NO: 32347 - RNA, 21 nt, Artificial Sequence
  RPE65 RNA guide
ggaaggagugagggagaagca

SEQ ID NO: 32348 - RNA, 21 nt, Artificial Sequence
  RPE65 RNA guide
ggaauccuggcucuuuaaaau

SEQ ID NO: 32349 - RNA, 21 nt, Artificial Sequence
  RPE65 RNA guide
ggacaagccuagcccaaggca

SEQ ID NO: 32350 - RNA, 21 nt, Artificial Sequence
  RPE65 RNA guide
ggacagcacuuagaaaauguc

SEQ ID NO: 32351 - RNA, 21 nt, Artificial Sequence
  RPE65 RNA guide
ggacucuccaccuaauagauu

SEQ ID NO: 32352 - RNA, 21 nt, Artificial Sequence
  RPE65 RNA guide
ggagaagcaucuugagaggau

SEQ ID NO: 32353 - RNA, 21 nt, Artificial Sequence
  RPE65 RNA guide
ggagacagaacauugcuucuu

SEQ ID NO: 32354 - RNA, 21 nt, Artificial Sequence
  RPE65 RNA guide
ggagagucccaauccucucaa

SEQ ID NO: 32355 - RNA, 21 nt, Artificial Sequence
  RPE65 RNA guide
ggagaugccccagagugugga

SEQ ID NO: 32356 - RNA, 21 nt, Artificial Sequence
  RPE65 RNA guide
ggagugagggagaagcaucuu

SEQ ID NO: 32357 - RNA, 21 nt, Artificial Sequence
  RPE65 RNA guide
ggauaaaggguuggaaggagu

SEQ ID NO: 32358 - RNA, 21 nt, Artificial Sequence
  RPE65 RNA guide
ggauaagaagcaauguucugu

SEQ ID NO: 32359 - RNA, 21 nt, Artificial Sequence
  RPE65 RNA guide
ggauugggacucuccaccuaa

SEQ ID NO: 32360 - RNA, 21 nt, Artificial Sequence
  RPE65 RNA guide
ggauugguguuuggggaaauc

SEQ ID NO: 32361 - RNA, 21 nt, Artificial Sequence
  RPE65 RNA guide
ggcaaaaggcaaauggauugg

SEQ ID NO: 32362 - RNA, 21 nt, Artificial Sequence
  RPE65 RNA guide
ggcaaauggauugguguuugg

SEQ ID NO: 32363 - RNA, 21 nt, Artificial Sequence
  RPE65 RNA guide
ggcagaguauaucagcagccu

SEQ ID NO: 32364 - RNA, 21 nt, Artificial Sequence
  RPE65 RNA guide
ggcagcuucuuccucauagag

SEQ ID NO: 32365 - RNA, 21 nt, Artificial Sequence
  RPE65 RNA guide
ggcagggauaagaagcaaugu

SEQ ID NO: 32366 - RNA, 21 nt, Artificial Sequence
  RPE65 RNA guide
ggcagugauuuucauuuccag

SEQ ID NO: 32367 - RNA, 21 nt, Artificial Sequence
  RPE65 RNA guide
ggcuaggcuuguccuugguaa

SEQ ID NO: 32368 - RNA, 21 nt, Artificial Sequence
  RPE65 RNA guide
ggcugcugauauacucugccu

SEQ ID NO: 32369 - RNA, 21 nt, Artificial Sequence
  RPE65 RNA guide
ggcuggaaaugaaaaucacug

SEQ ID NO: 32370 - RNA, 21 nt, Artificial Sequence
  RPE65 RNA guide
ggcuuguccuugguaaggcag

SEQ ID NO: 32371 - RNA, 21 nt, Artificial Sequence
  RPE65 RNA guide
gggaaaucuauuagguggaga

SEQ ID NO: 32372 - RNA, 21 nt, Artificial Sequence
  RPE65 RNA guide
gggacucuccaccuaauagau

SEQ ID NO: 32373 - RNA, 21 nt, Artificial Sequence
  RPE65 RNA guide
gggagaagcaucuugagagga

SEQ ID NO: 32374 - RNA, 21 nt, Artificial Sequence
  RPE65 RNA guide
gggagacagaacauugcuucu

SEQ ID NO: 32375 - RNA, 21 nt, Artificial Sequence
  RPE65 RNA guide
gggauaagaagcaauguucug

SEQ ID NO: 32376 - RNA, 21 nt, Artificial Sequence
  RPE65 RNA guide
gggcagcuucuuccucauaga

SEQ ID NO: 32377 - RNA, 21 nt, Artificial Sequence
  RPE65 RNA guide
gggcuaggcuuguccuuggua

SEQ ID NO: 32378 - RNA, 21 nt, Artificial Sequence
  RPE65 RNA guide
gggcuggaaaugaaaaucacu

SEQ ID NO: 32379 - RNA, 21 nt, Artificial Sequence
  RPE65 RNA guide
ggggaaaucuauuagguggag

SEQ ID NO: 32380 - RNA, 21 nt, Artificial Sequence
  RPE65 RNA guide
ggggagacagaacauugcuuc

SEQ ID NO: 32381 - RNA, 21 nt, Artificial Sequence
  RPE65 RNA guide
ggguuggaaggagugagggag

SEQ ID NO: 32382 - RNA, 21 nt, Artificial Sequence
  RPE65 RNA guide
gguaaggcagaguauaucagc

SEQ ID NO: 32383 - RNA, 21 nt, Artificial Sequence
  RPE65 RNA guide
ggugagucaagucagcagaca

SEQ ID NO: 32384 - RNA, 21 nt, Artificial Sequence
  RPE65 RNA guide
gguggagagucccaauccucu

SEQ ID NO: 32385 - RNA, 21 nt, Artificial Sequence
  RPE65 RNA guide
ggugugaucuccuagugaagg

SEQ ID NO: 32386 - RNA, 21 nt, Artificial Sequence
  RPE65 RNA guide
gguguuuggggaaaucuauua

SEQ ID NO: 32387 - RNA, 21 nt, Artificial Sequence
  RPE65 RNA guide
gguuggaaggagugagggaga

SEQ ID NO: 32388 - RNA, 21 nt, Artificial Sequence
  RPE65 RNA guide
guaaggcagaguauaucagca

SEQ ID NO: 32389 - RNA, 21 nt, Artificial Sequence
  RPE65 RNA guide
guauaucagcagccugauugg

SEQ ID NO: 32390 - RNA, 21 nt, Artificial Sequence
  RPE65 RNA guide
gucaagucagcagacauuuuc

SEQ ID NO: 32391 - RNA, 21 nt, Artificial Sequence
  RPE65 RNA guide
gucagcagacauuuucuaagu

SEQ ID NO: 32392 - RNA, 21 nt, Artificial Sequence
  RPE65 RNA guide
guccagcgcgagggcuggaaa

SEQ ID NO: 32393 - RNA, 21 nt, Artificial Sequence
  RPE65 RNA guide
gucccaauccucucaagaugc

SEQ ID NO: 32394 - RNA, 21 nt, Artificial Sequence
  RPE65 RNA guide
guccuugguaaggcagaguau

SEQ ID NO: 32395 - RNA, 21 nt, Artificial Sequence
  RPE65 RNA guide
gucugcugacuugacucaccu

SEQ ID NO: 32396 - RNA, 21 nt, Artificial Sequence
  RPE65 RNA guide
gugaaggugagucaagucagc

SEQ ID NO: 32397 - RNA, 21 nt, Artificial Sequence
  RPE65 RNA guide
gugagggagaagcaucuugag

SEQ ID NO: 32398 - RNA, 21 nt, Artificial Sequence
  RPE65 RNA guide
gugagucaagucagcagacau

SEQ ID NO: 32399 - RNA, 21 nt, Artificial Sequence
  RPE65 RNA guide
gugaucuccuagugaagguga

SEQ ID NO: 32400 - RNA, 21 nt, Artificial Sequence
  RPE65 RNA guide
gugaugaaggggagacagaac

SEQ ID NO: 32401 - RNA, 21 nt, Artificial Sequence
  RPE65 RNA guide
gugauuuucauuuccagcccu

SEQ ID NO: 32402 - RNA, 21 nt, Artificial Sequence
  RPE65 RNA guide
gugcuguccagcgcgagggcu

SEQ ID NO: 32403 - RNA, 21 nt, Artificial Sequence
  RPE65 RNA guide
guggagagucccaauccucuc

SEQ ID NO: 32404 - RNA, 21 nt, Artificial Sequence
  RPE65 RNA guide
guggagaugccccagagugug

SEQ ID NO: 32405 - RNA, 21 nt, Artificial Sequence
  RPE65 RNA guide
guggauaaaggguuggaagga

SEQ ID NO: 32406 - RNA, 21 nt, Artificial Sequence
  RPE65 RNA guide
gugugaucuccuagugaaggu

SEQ ID NO: 32407 - RNA, 21 nt, Artificial Sequence
  RPE65 RNA guide
guguggauaaaggguuggaag

SEQ ID NO: 32408 - RNA, 21 nt, Artificial Sequence
  RPE65 RNA guide
guguuuggggaaaucuauuag

SEQ ID NO: 32409 - RNA, 21 nt, Artificial Sequence
  RPE65 RNA guide
guuggaaggagugagggagaa

SEQ ID NO: 32410 - RNA, 21 nt, Artificial Sequence
  RPE65 RNA guide
guuuggggaaaucuauuaggu

SEQ ID NO: 32411 - RNA, 21 nt, Artificial Sequence
  RPE65 RNA guide
uaaaaaugagauggcaaaagg

SEQ ID NO: 32412 - RNA, 21 nt, Artificial Sequence
  RPE65 RNA guide
uaaagagccaggauuccuguu

SEQ ID NO: 32413 - RNA, 21 nt, Artificial Sequence
  RPE65 RNA guide
uaaaggguuggaaggagugag

SEQ ID NO: 32414 - RNA, 21 nt, Artificial Sequence
  RPE65 RNA guide
uaaaugaaaaaacaggaaucc

SEQ ID NO: 32415 - RNA, 21 nt, Artificial Sequence
  RPE65 RNA guide
uaagaagcaauguucugucuc

SEQ ID NO: 32416 - RNA, 21 nt, Artificial Sequence
  RPE65 RNA guide
uaaggcagaguauaucagcag

SEQ ID NO: 32417 - RNA, 21 nt, Artificial Sequence
  RPE65 RNA guide
uaagugcuguccagcgcgagg

SEQ ID NO: 32418 - RNA, 21 nt, Artificial Sequence
  RPE65 RNA guide
uaauagauuuccccaaacacc

SEQ ID NO: 32419 - RNA, 21 nt, Artificial Sequence
  RPE65 RNA guide
uaccaaggacaagccuagccc

SEQ ID NO: 32420 - RNA, 21 nt, Artificial Sequence
  RPE65 RNA guide
uacuccucacuccacuaaaau

SEQ ID NO: 32421 - RNA, 21 nt, Artificial Sequence
  RPE65 RNA guide
uacucugccuuaccaaggaca

SEQ ID NO: 32422 - RNA, 21 nt, Artificial Sequence
  RPE65 RNA guide
uagaaaaugucugcugacuug

SEQ ID NO: 32423 - RNA, 21 nt, Artificial Sequence
  RPE65 RNA guide
uagagcuggcagugauuuuca

SEQ ID NO: 32424 - RNA, 21 nt, Artificial Sequence
  RPE65 RNA guide
uagauuuccccaaacaccaau

SEQ ID NO: 32425 - RNA, 21 nt, Artificial Sequence
  RPE65 RNA guide
uagauuuuaaagagccaggau

SEQ ID NO: 32426 - RNA, 21 nt, Artificial Sequence
  RPE65 RNA guide
uagcccaaggcagggauaaga

SEQ ID NO: 32427 - RNA, 21 nt, Artificial Sequence
  RPE65 RNA guide
uagcucuagauuuuaaagagc

SEQ ID NO: 32428 - RNA, 21 nt, Artificial Sequence
  RPE65 RNA guide
uaggcuuguccuugguaaggc

SEQ ID NO: 32429 - RNA, 21 nt, Artificial Sequence
  RPE65 RNA guide
uagguggagagucccaauccu

SEQ ID NO: 32430 - RNA, 21 nt, Artificial Sequence
  RPE65 RNA guide
uagugaaggugagucaaguca

SEQ ID NO: 32431 - RNA, 21 nt, Artificial Sequence
  RPE65 RNA guide
uauacucugccuuaccaagga

SEQ ID NO: 32432 - RNA, 21 nt, Artificial Sequence
  RPE65 RNA guide
uauaucagcagccugauuggg

SEQ ID NO: 32433 - RNA, 21 nt, Artificial Sequence
  RPE65 RNA guide
uauauuuuaguggagugagga

SEQ ID NO: 32434 - RNA, 21 nt, Artificial Sequence
  RPE65 RNA guide
uaucagcagccugauugggca

SEQ ID NO: 32435 - RNA, 21 nt, Artificial Sequence
  RPE65 RNA guide
uauccacacucuggggcaucu

SEQ ID NO: 32436 - RNA, 21 nt, Artificial Sequence
  RPE65 RNA guide
uaucccugccuugggcuaggc

SEQ ID NO: 32437 - RNA, 21 nt, Artificial Sequence
  RPE65 RNA guide
uaugaggaagaagcugcccaa

SEQ ID NO: 32438 - RNA, 21 nt, Artificial Sequence
  RPE65 RNA guide
uauuagguggagagucccaau

SEQ ID NO: 32439 - RNA, 21 nt, Artificial Sequence
  RPE65 RNA guide
uauucucacucuuaauccaua

SEQ ID NO: 32440 - RNA, 21 nt, Artificial Sequence
  RPE65 RNA guide
uauuuuaguggagugaggagu

SEQ ID NO: 32441 - RNA, 21 nt, Artificial Sequence
  RPE65 RNA guide
ucaagaugcuucucccucacu

SEQ ID NO: 32442 - RNA, 21 nt, Artificial Sequence
  RPE65 RNA guide
ucaagucagcagacauuuucu

SEQ ID NO: 32443 - RNA, 21 nt, Artificial Sequence
  RPE65 RNA guide
ucaccuucacuaggagaucac

SEQ ID NO: 32444 - RNA, 21 nt, Artificial Sequence
  RPE65 RNA guide
ucacuaggagaucacaccuug

SEQ ID NO: 32445 - RNA, 21 nt, Artificial Sequence
  RPE65 RNA guide
ucacuccuuccaacccuuuau

SEQ ID NO: 32446 - RNA, 21 nt, Artificial Sequence
  RPE65 RNA guide
ucacugccagcucuaugagga

SEQ ID NO: 32447 - RNA, 21 nt, Artificial Sequence
  RPE65 RNA guide
ucagcagacauuuucuaagug

SEQ ID NO: 32448 - RNA, 21 nt, Artificial Sequence
  RPE65 RNA guide
ucagcagccugauugggcagc

SEQ ID NO: 32449 - RNA, 21 nt, Artificial Sequence
  RPE65 RNA guide
ucaggcugcugauauacucug

SEQ ID NO: 32450 - RNA, 21 nt, Artificial Sequence
  RPE65 RNA guide
ucauagagcuggcagugauuu

SEQ ID NO: 32451 - RNA, 21 nt, Artificial Sequence
  RPE65 RNA guide
ucauuuccagcccucgcgcug

SEQ ID NO: 32452 - RNA, 21 nt, Artificial Sequence
  RPE65 RNA guide
uccaacccuuuauccacacuc

SEQ ID NO: 32453 - RNA, 21 nt, Artificial Sequence
  RPE65 RNA guide
uccaccuaauagauuucccca

SEQ ID NO: 32454 - RNA, 21 nt, Artificial Sequence
  RPE65 RNA guide
uccagcccucgcgcuggacag

SEQ ID NO: 32455 - RNA, 21 nt, Artificial Sequence
  RPE65 RNA guide
uccagcgcgagggcuggaaau

SEQ ID NO: 32456 - RNA, 21 nt, Artificial Sequence
  RPE65 RNA guide
uccauuugccuuuugccaucu

SEQ ID NO: 32457 - RNA, 21 nt, Artificial Sequence
  RPE65 RNA guide
ucccaaggugugaucuccuag

SEQ ID NO: 32458 - RNA, 21 nt, Artificial Sequence
  RPE65 RNA guide
ucccaauccucucaagaugcu

SEQ ID NO: 32459 - RNA, 21 nt, Artificial Sequence
  RPE65 RNA guide
uccccaaacaccaauccauuu

SEQ ID NO: 32460 - RNA, 21 nt, Artificial Sequence
  RPE65 RNA guide
ucccucacuccuuccaacccu

SEQ ID NO: 32461 - RNA, 21 nt, Artificial Sequence
  RPE65 RNA guide
ucccugccuugggcuaggcuu

SEQ ID NO: 32462 - RNA, 21 nt, Artificial Sequence
  RPE65 RNA guide
uccuagugaaggugagucaag

SEQ ID NO: 32463 - RNA, 21 nt, Artificial Sequence
  RPE65 RNA guide
uccucacuccacuaaaauaua

SEQ ID NO: 32464 - RNA, 21 nt, Artificial Sequence
  RPE65 RNA guide
uccucauagagcuggcaguga

SEQ ID NO: 32465 - RNA, 21 nt, Artificial Sequence
  RPE65 RNA guide
uccucucaagaugcuucuccc

SEQ ID NO: 32466 - RNA, 21 nt, Artificial Sequence
  RPE65 RNA guide
uccuggcucuuuaaaaucuag

SEQ ID NO: 32467 - RNA, 21 nt, Artificial Sequence
  RPE65 RNA guide
uccuuccaacccuuuauccac

SEQ ID NO: 32468 - RNA, 21 nt, Artificial Sequence
  RPE65 RNA guide
uccuugguaaggcagaguaua

SEQ ID NO: 32469 - RNA, 21 nt, Artificial Sequence
  RPE65 RNA guide
ucgcgcuggacagcacuuaga

SEQ ID NO: 32470 - RNA, 21 nt, Artificial Sequence
  RPE65 RNA guide
ucuaagugcuguccagcgcga

SEQ ID NO: 32471 - RNA, 21 nt, Artificial Sequence
  RPE65 RNA guide
ucuacuccucacuccacuaaa

SEQ ID NO: 32472 - RNA, 21 nt, Artificial Sequence
  RPE65 RNA guide
ucuagauuuuaaagagccagg

SEQ ID NO: 32473 - RNA, 21 nt, Artificial Sequence
  RPE65 RNA guide
ucuaugaggaagaagcugccc

SEQ ID NO: 32474 - RNA, 21 nt, Artificial Sequence
  RPE65 RNA guide
ucuauuagguggagaguccca

SEQ ID NO: 32475 - RNA, 21 nt, Artificial Sequence
  RPE65 RNA guide
ucucaagaugcuucucccuca

SEQ ID NO: 32476 - RNA, 21 nt, Artificial Sequence
  RPE65 RNA guide
ucuccaccuaauagauuuccc

SEQ ID NO: 32477 - RNA, 21 nt, Artificial Sequence
  RPE65 RNA guide
ucucccucacuccuuccaacc

SEQ ID NO: 32478 - RNA, 21 nt, Artificial Sequence
  RPE65 RNA guide
ucuccuagugaaggugaguca

SEQ ID NO: 32479 - RNA, 21 nt, Artificial Sequence
  RPE65 RNA guide
ucugccuuaccaaggacaagc

SEQ ID NO: 32480 - RNA, 21 nt, Artificial Sequence
  RPE65 RNA guide
ucugcugacuugacucaccuu

SEQ ID NO: 32481 - RNA, 21 nt, Artificial Sequence
  RPE65 RNA guide
ucuuaaaaaugagauggcaaa

SEQ ID NO: 32482 - RNA, 21 nt, Artificial Sequence
  RPE65 RNA guide
ucuuaucccugccuugggcua

SEQ ID NO: 32483 - RNA, 21 nt, Artificial Sequence
  RPE65 RNA guide
ucuuccucauagagcuggcag

SEQ ID NO: 32484 - RNA, 21 nt, Artificial Sequence
  RPE65 RNA guide
ucuugagaggauugggacucu

SEQ ID NO: 32485 - RNA, 21 nt, Artificial Sequence
  RPE65 RNA guide
ucuugauauauuuuaguggag

SEQ ID NO: 32486 - RNA, 21 nt, Artificial Sequence
  RPE65 RNA guide
ugaaaaaacaggaauccuggc

SEQ ID NO: 32487 - RNA, 21 nt, Artificial Sequence
  RPE65 RNA guide
ugaaaaucacugccagcucua

SEQ ID NO: 32488 - RNA, 21 nt, Artificial Sequence
  RPE65 RNA guide
ugaaggggagacagaacauug

SEQ ID NO: 32489 - RNA, 21 nt, Artificial Sequence
  RPE65 RNA guide
ugaaggugagucaagucagca

SEQ ID NO: 32490 - RNA, 21 nt, Artificial Sequence
  RPE65 RNA guide
ugacucaccuucacuaggaga

SEQ ID NO: 32491 - RNA, 21 nt, Artificial Sequence
  RPE65 RNA guide
ugacuugacucaccuucacua

SEQ ID NO: 32492 - RNA, 21 nt, Artificial Sequence
  RPE65 RNA guide
ugagaggauugggacucucca

SEQ ID NO: 32493 - RNA, 21 nt, Artificial Sequence
  RPE65 RNA guide
ugagauggcaaaaggcaaaug

SEQ ID NO: 32494 - RNA, 21 nt, Artificial Sequence
  RPE65 RNA guide
ugaggaagaagcugcccaauc

SEQ ID NO: 32495 - RNA, 21 nt, Artificial Sequence
  RPE65 RNA guide
ugagggagaagcaucuugaga

SEQ ID NO: 32496 - RNA, 21 nt, Artificial Sequence
  RPE65 RNA guide
ugagucaagucagcagacauu

SEQ ID NO: 32497 - RNA, 21 nt, Artificial Sequence
  RPE65 RNA guide
ugauauacucugccuuaccaa

SEQ ID NO: 32498 - RNA, 21 nt, Artificial Sequence
  RPE65 RNA guide
ugauauauuuuaguggaguga

SEQ ID NO: 32499 - RNA, 21 nt, Artificial Sequence
  RPE65 RNA guide
ugaucuccuagugaaggugag

SEQ ID NO: 32500 - RNA, 21 nt, Artificial Sequence
  RPE65 RNA guide
ugaugaaggggagacagaaca

SEQ ID NO: 32501 - RNA, 21 nt, Artificial Sequence
  RPE65 RNA guide
ugauugggcagcuucuuccuc

SEQ ID NO: 32502 - RNA, 21 nt, Artificial Sequence
  RPE65 RNA guide
ugauuuucauuuccagcccuc

SEQ ID NO: 32503 - RNA, 21 nt, Artificial Sequence
  RPE65 RNA guide
ugccagcucuaugaggaagaa

SEQ ID NO: 32504 - RNA, 21 nt, Artificial Sequence
  RPE65 RNA guide
ugcccaaucaggcugcugaua

SEQ ID NO: 32505 - RNA, 21 nt, Artificial Sequence
  RPE65 RNA guide
ugccccagaguguggauaaag

SEQ ID NO: 32506 - RNA, 21 nt, Artificial Sequence
  RPE65 RNA guide
ugccuuaccaaggacaagccu

SEQ ID NO: 32507 - RNA, 21 nt, Artificial Sequence
  RPE65 RNA guide
ugccuugggcuaggcuugucc

SEQ ID NO: 32508 - RNA, 21 nt, Artificial Sequence
  RPE65 RNA guide
ugccuuuugccaucucauuuu

SEQ ID NO: 32509 - RNA, 21 nt, Artificial Sequence
  RPE65 RNA guide
ugcugacuugacucaccuuca

SEQ ID NO: 32510 - RNA, 21 nt, Artificial Sequence
  RPE65 RNA guide
ugcugauauacucugccuuac

SEQ ID NO: 32511 - RNA, 21 nt, Artificial Sequence
  RPE65 RNA guide
ugcuguccagcgcgagggcug

SEQ ID NO: 32512 - RNA, 21 nt, Artificial Sequence
  RPE65 RNA guide
ugcuucucccucacuccuucc

SEQ ID NO: 32513 - RNA, 21 nt, Artificial Sequence
  RPE65 RNA guide
ugcuucuuaucccugccuugg

SEQ ID NO: 32514 - RNA, 21 nt, Artificial Sequence
  RPE65 RNA guide
uggaaaugaaaaucacugcca

SEQ ID NO: 32515 - RNA, 21 nt, Artificial Sequence
  RPE65 RNA guide
uggaaggagugagggagaagc

SEQ ID NO: 32516 - RNA, 21 nt, Artificial Sequence
  RPE65 RNA guide
uggacagcacuuagaaaaugu

SEQ ID NO: 32517 - RNA, 21 nt, Artificial Sequence
  RPE65 RNA guide
uggagagucccaauccucuca

SEQ ID NO: 32518 - RNA, 21 nt, Artificial Sequence
  RPE65 RNA guide
uggagaugccccagagugugg

SEQ ID NO: 32519 - RNA, 21 nt, Artificial Sequence
  RPE65 RNA guide
uggauaaaggguuggaaggag

SEQ ID NO: 32520 - RNA, 21 nt, Artificial Sequence
  RPE65 RNA guide
uggauugguguuuggggaaau

SEQ ID NO: 32521 - RNA, 21 nt, Artificial Sequence
  RPE65 RNA guide
uggcaaaaggcaaauggauug

SEQ ID NO: 32522 - RNA, 21 nt, Artificial Sequence
  RPE65 RNA guide
uggcagugauuuucauuucca

SEQ ID NO: 32523 - RNA, 21 nt, Artificial Sequence
  RPE65 RNA guide
ugggacucuccaccuaauaga

SEQ ID NO: 32524 - RNA, 21 nt, Artificial Sequence
  RPE65 RNA guide
ugggcagcuucuuccucauag

SEQ ID NO: 32525 - RNA, 21 nt, Artificial Sequence
  RPE65 RNA guide
ugggcuaggcuuguccuuggu

SEQ ID NO: 32526 - RNA, 21 nt, Artificial Sequence
  RPE65 RNA guide
uggggaaaucuauuaggugga

SEQ ID NO: 32527 - RNA, 21 nt, Artificial Sequence
  RPE65 RNA guide
ugguaaggcagaguauaucag

SEQ ID NO: 32528 - RNA, 21 nt, Artificial Sequence
  RPE65 RNA guide
ugguguuuggggaaaucuauu

SEQ ID NO: 32529 - RNA, 21 nt, Artificial Sequence
  RPE65 RNA guide
uguccagcgcgagggcuggaa

SEQ ID NO: 32530 - RNA, 21 nt, Artificial Sequence
  RPE65 RNA guide
uguccuugguaaggcagagua

SEQ ID NO: 32531 - RNA, 21 nt, Artificial Sequence
  RPE65 RNA guide
ugucugcugacuugacucacc

SEQ ID NO: 32532 - RNA, 21 nt, Artificial Sequence
  RPE65 RNA guide
ugugaucuccuagugaaggug

SEQ ID NO: 32533 - RNA, 21 nt, Artificial Sequence
  RPE65 RNA guide
ugugaugaaggggagacagaa

SEQ ID NO: 32534 - RNA, 21 nt, Artificial Sequence
  RPE65 RNA guide
uguggagaugccccagagugu

SEQ ID NO: 32535 - RNA, 21 nt, Artificial Sequence
  RPE65 RNA guide
uguggauaaaggguuggaagg

SEQ ID NO: 32536 - RNA, 21 nt, Artificial Sequence
  RPE65 RNA guide
uguuuggggaaaucuauuagg

SEQ ID NO: 32537 - RNA, 21 nt, Artificial Sequence
  RPE65 RNA guide
uuaaaaaugagauggcaaaag

SEQ ID NO: 32538 - RNA, 21 nt, Artificial Sequence
  RPE65 RNA guide
uuaaagagccaggauuccugu

SEQ ID NO: 32539 - RNA, 21 nt, Artificial Sequence
  RPE65 RNA guide
uuaaaugaaaaaacaggaauc

SEQ ID NO: 32540 - RNA, 21 nt, Artificial Sequence
  RPE65 RNA guide
uuaccaaggacaagccuagcc

SEQ ID NO: 32541 - RNA, 21 nt, Artificial Sequence
  RPE65 RNA guide
uuagaaaaugucugcugacuu

SEQ ID NO: 32542 - RNA, 21 nt, Artificial Sequence
  RPE65 RNA guide
uuagguggagagucccaaucc

SEQ ID NO: 32543 - RNA, 21 nt, Artificial Sequence
  RPE65 RNA guide
uuauccacacucuggggcauc

SEQ ID NO: 32544 - RNA, 21 nt, Artificial Sequence
  RPE65 RNA guide
uuaucccugccuugggcuagg

SEQ ID NO: 32545 - RNA, 21 nt, Artificial Sequence
  RPE65 RNA guide
uucacuaggagaucacaccuu

SEQ ID NO: 32546 - RNA, 21 nt, Artificial Sequence
  RPE65 RNA guide
uucauuuccagcccucgcgcu

SEQ ID NO: 32547 - RNA, 21 nt, Artificial Sequence
  RPE65 RNA guide
uuccaacccuuuauccacacu

SEQ ID NO: 32548 - RNA, 21 nt, Artificial Sequence
  RPE65 RNA guide
uuccagcccucgcgcuggaca

SEQ ID NO: 32549 - RNA, 21 nt, Artificial Sequence
  RPE65 RNA guide
uucccaaggugugaucuccua

SEQ ID NO: 32550 - RNA, 21 nt, Artificial Sequence
  RPE65 RNA guide
uuccccaaacaccaauccauu

SEQ ID NO: 32551 - RNA, 21 nt, Artificial Sequence
  RPE65 RNA guide
uuccucauagagcuggcagug

SEQ ID NO: 32552 - RNA, 21 nt, Artificial Sequence
  RPE65 RNA guide
uucuaagugcuguccagcgcg

SEQ ID NO: 32553 - RNA, 21 nt, Artificial Sequence
  RPE65 RNA guide
uucuacuccucacuccacuaa

SEQ ID NO: 32554 - RNA, 21 nt, Artificial Sequence
  RPE65 RNA guide
uucucccucacuccuuccaac

SEQ ID NO: 32555 - RNA, 21 nt, Artificial Sequence
  RPE65 RNA guide
uucuuaaaaaugagauggcaa

SEQ ID NO: 32556 - RNA, 21 nt, Artificial Sequence
  RPE65 RNA guide
uucuuaucccugccuugggcu

SEQ ID NO: 32557 - RNA, 21 nt, Artificial Sequence
  RPE65 RNA guide
uucuuccucauagagcuggca

SEQ ID NO: 32558 - RNA, 21 nt, Artificial Sequence
  RPE65 RNA guide
uugacucaccuucacuaggag

SEQ ID NO: 32559 - RNA, 21 nt, Artificial Sequence
  RPE65 RNA guide
uugagaggauugggacucucc

SEQ ID NO: 32560 - RNA, 21 nt, Artificial Sequence
  RPE65 RNA guide
uugauauauuuuaguggagug

SEQ ID NO: 32561 - RNA, 21 nt, Artificial Sequence
  RPE65 RNA guide
uugccuuuugccaucucauuu

SEQ ID NO: 32562 - RNA, 21 nt, Artificial Sequence
  RPE65 RNA guide
uugcuucuuaucccugccuug

SEQ ID NO: 32563 - RNA, 21 nt, Artificial Sequence
  RPE65 RNA guide
uuggaaggagugagggagaag

SEQ ID NO: 32564 - RNA, 21 nt, Artificial Sequence
  RPE65 RNA guide
uugggacucuccaccuaauag

SEQ ID NO: 32565 - RNA, 21 nt, Artificial Sequence
  RPE65 RNA guide
uugggcagcuucuuccucaua

SEQ ID NO: 32566 - RNA, 21 nt, Artificial Sequence
  RPE65 RNA guide
uugggcuaggcuuguccuugg

SEQ ID NO: 32567 - RNA, 21 nt, Artificial Sequence
  RPE65 RNA guide
uuggggaaaucuauuaggugg

SEQ ID NO: 32568 - RNA, 21 nt, Artificial Sequence
  RPE65 RNA guide
uugguaaggcagaguauauca

SEQ ID NO: 32569 - RNA, 21 nt, Artificial Sequence
  RPE65 RNA guide
uugguguuuggggaaaucuau

SEQ ID NO: 32570 - RNA, 21 nt, Artificial Sequence
  RPE65 RNA guide
uuguccuugguaaggcagagu

SEQ ID NO: 32571 - RNA, 21 nt, Artificial Sequence
  RPE65 RNA guide
uuuaaagagccaggauuccug

SEQ ID NO: 32572 - RNA, 21 nt, Artificial Sequence
  RPE65 RNA guide
uuuauccacacucuggggcau

SEQ ID NO: 32573 - RNA, 21 nt, Artificial Sequence
  RPE65 RNA guide
uuucauuuccagcccucgcgc

SEQ ID NO: 32574 - RNA, 21 nt, Artificial Sequence
  RPE65 RNA guide
uuuccagcccucgcgcuggac

SEQ ID NO: 32575 - RNA, 21 nt, Artificial Sequence
  RPE65 RNA guide
uuucccaaggugugaucuccu

SEQ ID NO: 32576 - RNA, 21 nt, Artificial Sequence
  RPE65 RNA guide
uuuccccaaacaccaauccau

SEQ ID NO: 32577 - RNA, 21 nt, Artificial Sequence
  RPE65 RNA guide
uuucuaagugcuguccagcgc

SEQ ID NO: 32578 - RNA, 21 nt, Artificial Sequence
  RPE65 RNA guide
uuugccuuuugccaucucauu

SEQ ID NO: 32579 - RNA, 21 nt, Artificial Sequence
  RPE65 RNA guide
uuuggggaaaucuauuaggug

SEQ ID NO: 32580 - RNA, 21 nt, Artificial Sequence
  RPE65 RNA guide
uuuuaaagagccaggauuccu

SEQ ID NO: 32581 - RNA, 21 nt, Artificial Sequence
  RPE65 RNA guide
uuuucauuuccagcccucgcg

SEQ ID NO: 32582 - RNA, 21 nt, Artificial Sequence
  RPE65 RNA guide
uuuucuaagugcuguccagcg

SEQ ID NO: 32583 - RNA, 22 nt, Artificial Sequence
  RPE65 RNA guide
aaaaaacaggaauccuggcucu

SEQ ID NO: 32584 - RNA, 22 nt, Artificial Sequence
  RPE65 RNA guide
aaaaacaggaauccuggcucuu

SEQ ID NO: 32585 - RNA, 22 nt, Artificial Sequence
  RPE65 RNA guide
aaaaaugagauggcaaaaggca

SEQ ID NO: 32586 - RNA, 22 nt, Artificial Sequence
  RPE65 RNA guide
aaaacaggaauccuggcucuuu

SEQ ID NO: 32587 - RNA, 22 nt, Artificial Sequence
  RPE65 RNA guide
aaaaggcaaauggauugguguu

SEQ ID NO: 32588 - RNA, 22 nt, Artificial Sequence
  RPE65 RNA guide
aaaaucacugccagcucuauga

SEQ ID NO: 32589 - RNA, 22 nt, Artificial Sequence
  RPE65 RNA guide
aaaaugagauggcaaaaggcaa

SEQ ID NO: 32590 - RNA, 22 nt, Artificial Sequence
  RPE65 RNA guide
aaaaugucugcugacuugacuc

SEQ ID NO: 32591 - RNA, 22 nt, Artificial Sequence
  RPE65 RNA guide
aaacaccaauccauuugccuuu

SEQ ID NO: 32592 - RNA, 22 nt, Artificial Sequence
  RPE65 RNA guide
aaacaggaauccuggcucuuua

SEQ ID NO: 32593 - RNA, 22 nt, Artificial Sequence
  RPE65 RNA guide
aaagagccaggauuccuguuuu

SEQ ID NO: 32594 - RNA, 22 nt, Artificial Sequence
  RPE65 RNA guide
aaaggcaaauggauugguguuu

SEQ ID NO: 32595 - RNA, 22 nt, Artificial Sequence
  RPE65 RNA guide
aaaggguuggaaggagugaggg

SEQ ID NO: 32596 - RNA, 22 nt, Artificial Sequence
  RPE65 RNA guide
aaaucacugccagcucuaugag

SEQ ID NO: 32597 - RNA, 22 nt, Artificial Sequence
  RPE65 RNA guide
aaaucuauuagguggagagucc

SEQ ID NO: 32598 - RNA, 22 nt, Artificial Sequence
  RPE65 RNA guide
aaaugaaaaaacaggaauccug

SEQ ID NO: 32599 - RNA, 22 nt, Artificial Sequence
  RPE65 RNA guide
aaaugaaaaucacugccagcuc

SEQ ID NO: 32600 - RNA, 22 nt, Artificial Sequence
  RPE65 RNA guide
aaaugagauggcaaaaggcaaa

SEQ ID NO: 32601 - RNA, 22 nt, Artificial Sequence
  RPE65 RNA guide
aaauggauugguguuuggggaa

SEQ ID NO: 32602 - RNA, 22 nt, Artificial Sequence
  RPE65 RNA guide
aaaugucugcugacuugacuca

SEQ ID NO: 32603 - RNA, 22 nt, Artificial Sequence
  RPE65 RNA guide
aacaccaauccauuugccuuuu

SEQ ID NO: 32604 - RNA, 22 nt, Artificial Sequence
  RPE65 RNA guide
aacaggaauccuggcucuuuaa

SEQ ID NO: 32605 - RNA, 22 nt, Artificial Sequence
  RPE65 RNA guide
aacauugcuucuuaucccugcc

SEQ ID NO: 32606 - RNA, 22 nt, Artificial Sequence
  RPE65 RNA guide
aacccuuuauccacacucuggg

SEQ ID NO: 32607 - RNA, 22 nt, Artificial Sequence
  RPE65 RNA guide
aagaagcaauguucugucuccc

SEQ ID NO: 32608 - RNA, 22 nt, Artificial Sequence
  RPE65 RNA guide
aagaagcugcccaaucaggcug

SEQ ID NO: 32609 - RNA, 22 nt, Artificial Sequence
  RPE65 RNA guide
aagagccaggauuccuguuuuu

SEQ ID NO: 32610 - RNA, 22 nt, Artificial Sequence
  RPE65 RNA guide
aagaugcuucucccucacuccu

SEQ ID NO: 32611 - RNA, 22 nt, Artificial Sequence
  RPE65 RNA guide
aagcaauguucugucuccccuu

SEQ ID NO: 32612 - RNA, 22 nt, Artificial Sequence
  RPE65 RNA guide
aagcaucuugagaggauuggga

SEQ ID NO: 32613 - RNA, 22 nt, Artificial Sequence
  RPE65 RNA guide
aagccuagcccaaggcagggau

SEQ ID NO: 32614 - RNA, 22 nt, Artificial Sequence
  RPE65 RNA guide
aagcugcccaaucaggcugcug

SEQ ID NO: 32615 - RNA, 22 nt, Artificial Sequence
  RPE65 RNA guide
aaggacaagccuagcccaaggc

SEQ ID NO: 32616 - RNA, 22 nt, Artificial Sequence
  RPE65 RNA guide
aaggagugagggagaagcaucu

SEQ ID NO: 32617 - RNA, 22 nt, Artificial Sequence
  RPE65 RNA guide
aaggcaaauggauugguguuug

SEQ ID NO: 32618 - RNA, 22 nt, Artificial Sequence
  RPE65 RNA guide
aaggcagaguauaucagcagcc

SEQ ID NO: 32619 - RNA, 22 nt, Artificial Sequence
  RPE65 RNA guide
aaggcagggauaagaagcaaug

SEQ ID NO: 32620 - RNA, 22 nt, Artificial Sequence
  RPE65 RNA guide
aaggggagacagaacauugcuu

SEQ ID NO: 32621 - RNA, 22 nt, Artificial Sequence
  RPE65 RNA guide
aaggguuggaaggagugaggga

SEQ ID NO: 32622 - RNA, 22 nt, Artificial Sequence
  RPE65 RNA guide
aaggugagucaagucagcagac

SEQ ID NO: 32623 - RNA, 22 nt, Artificial Sequence
  RPE65 RNA guide
aaggugugaucuccuagugaag

SEQ ID NO: 32624 - RNA, 22 nt, Artificial Sequence
  RPE65 RNA guide
aagucagcagacauuuucuaag

SEQ ID NO: 32625 - RNA, 22 nt, Artificial Sequence
  RPE65 RNA guide
aagugcuguccagcgcgagggc

SEQ ID NO: 32626 - RNA, 22 nt, Artificial Sequence
  RPE65 RNA guide
aauagauuuccccaaacaccaa

SEQ ID NO: 32627 - RNA, 22 nt, Artificial Sequence
  RPE65 RNA guide
aaucacugccagcucuaugagg

SEQ ID NO: 32628 - RNA, 22 nt, Artificial Sequence
  RPE65 RNA guide
aaucaggcugcugauauacucu

SEQ ID NO: 32629 - RNA, 22 nt, Artificial Sequence
  RPE65 RNA guide
aauccauuugccuuuugccauc

SEQ ID NO: 32630 - RNA, 22 nt, Artificial Sequence
  RPE65 RNA guide
aauccucucaagaugcuucucc

SEQ ID NO: 32631 - RNA, 22 nt, Artificial Sequence
  RPE65 RNA guide
aauccuggcucuuuaaaaucua

SEQ ID NO: 32632 - RNA, 22 nt, Artificial Sequence
  RPE65 RNA guide
aaucuauuagguggagaguccc

SEQ ID NO: 32633 - RNA, 22 nt, Artificial Sequence
  RPE65 RNA guide
aaugaaaaaacaggaauccugg

SEQ ID NO: 32634 - RNA, 22 nt, Artificial Sequence
  RPE65 RNA guide
aaugaaaaucacugccagcucu

SEQ ID NO: 32635 - RNA, 22 nt, Artificial Sequence
  RPE65 RNA guide
aaugagauggcaaaaggcaaau

SEQ ID NO: 32636 - RNA, 22 nt, Artificial Sequence
  RPE65 RNA guide
aauggauugguguuuggggaaa

SEQ ID NO: 32637 - RNA, 22 nt, Artificial Sequence
  RPE65 RNA guide
aaugucugcugacuugacucac

SEQ ID NO: 32638 - RNA, 22 nt, Artificial Sequence
  RPE65 RNA guide
aauguucugucuccccuucauc

SEQ ID NO: 32639 - RNA, 22 nt, Artificial Sequence
  RPE65 RNA guide
acaagccuagcccaaggcaggg

SEQ ID NO: 32640 - RNA, 22 nt, Artificial Sequence
  RPE65 RNA guide
acaccaauccauuugccuuuug

SEQ ID NO: 32641 - RNA, 22 nt, Artificial Sequence
  RPE65 RNA guide
acagaacauugcuucuuauccc

SEQ ID NO: 32642 - RNA, 22 nt, Artificial Sequence
  RPE65 RNA guide
acagcacuuagaaaaugucugc

SEQ ID NO: 32643 - RNA, 22 nt, Artificial Sequence
  RPE65 RNA guide
acaggaauccuggcucuuuaaa

SEQ ID NO: 32644 - RNA, 22 nt, Artificial Sequence
  RPE65 RNA guide
acauugcuucuuaucccugccu

SEQ ID NO: 32645 - RNA, 22 nt, Artificial Sequence
  RPE65 RNA guide
acauuuucuaagugcuguccag

SEQ ID NO: 32646 - RNA, 22 nt, Artificial Sequence
  RPE65 RNA guide
accaaggacaagccuagcccaa

SEQ ID NO: 32647 - RNA, 22 nt, Artificial Sequence
  RPE65 RNA guide
accaauccauuugccuuuugcc

SEQ ID NO: 32648 - RNA, 22 nt, Artificial Sequence
  RPE65 RNA guide
acccuuuauccacacucugggg

SEQ ID NO: 32649 - RNA, 22 nt, Artificial Sequence
  RPE65 RNA guide
accuaauagauuuccccaaaca

SEQ ID NO: 32650 - RNA, 22 nt, Artificial Sequence
  RPE65 RNA guide
accuucacuaggagaucacacc

SEQ ID NO: 32651 - RNA, 22 nt, Artificial Sequence
  RPE65 RNA guide
acucaccuucacuaggagauca

SEQ ID NO: 32652 - RNA, 22 nt, Artificial Sequence
  RPE65 RNA guide
acuccucacuccacuaaaauau

SEQ ID NO: 32653 - RNA, 22 nt, Artificial Sequence
  RPE65 RNA guide
acuccuuccaacccuuuaucca

SEQ ID NO: 32654 - RNA, 22 nt, Artificial Sequence
  RPE65 RNA guide
acucuccaccuaauagauuucc

SEQ ID NO: 32655 - RNA, 22 nt, Artificial Sequence
  RPE65 RNA guide
acucugccuuaccaaggacaag

SEQ ID NO: 32656 - RNA, 22 nt, Artificial Sequence
  RPE65 RNA guide
acugccagcucuaugaggaaga

SEQ ID NO: 32657 - RNA, 22 nt, Artificial Sequence
  RPE65 RNA guide
acuuagaaaaugucugcugacu

SEQ ID NO: 32658 - RNA, 22 nt, Artificial Sequence
  RPE65 RNA guide
acuucuacuccucacuccacua

SEQ ID NO: 32659 - RNA, 22 nt, Artificial Sequence
  RPE65 RNA guide
acuugacucaccuucacuagga

SEQ ID NO: 32660 - RNA, 22 nt, Artificial Sequence
  RPE65 RNA guide
agaaaaugucugcugacuugac

SEQ ID NO: 32661 - RNA, 22 nt, Artificial Sequence
  RPE65 RNA guide
agaacauugcuucuuaucccug

SEQ ID NO: 32662 - RNA, 22 nt, Artificial Sequence
  RPE65 RNA guide
agaagcaauguucugucucccc

SEQ ID NO: 32663 - RNA, 22 nt, Artificial Sequence
  RPE65 RNA guide
agaagcaucuugagaggauugg

SEQ ID NO: 32664 - RNA, 22 nt, Artificial Sequence
  RPE65 RNA guide
agaagcugcccaaucaggcugc

SEQ ID NO: 32665 - RNA, 22 nt, Artificial Sequence
  RPE65 RNA guide
agacagaacauugcuucuuauc

SEQ ID NO: 32666 - RNA, 22 nt, Artificial Sequence
  RPE65 RNA guide
agacauuuucuaagugcugucc

SEQ ID NO: 32667 - RNA, 22 nt, Artificial Sequence
  RPE65 RNA guide
agagccaggauuccuguuuuuu

SEQ ID NO: 32668 - RNA, 22 nt, Artificial Sequence
  RPE65 RNA guide
agagcuggcagugauuuucauu

SEQ ID NO: 32669 - RNA, 22 nt, Artificial Sequence
  RPE65 RNA guide
agaggauugggacucuccaccu

SEQ ID NO: 32670 - RNA, 22 nt, Artificial Sequence
  RPE65 RNA guide
agaguauaucagcagccugauu

SEQ ID NO: 32671 - RNA, 22 nt, Artificial Sequence
  RPE65 RNA guide
agagucccaauccucucaagau

SEQ ID NO: 32672 - RNA, 22 nt, Artificial Sequence
  RPE65 RNA guide
agaguguggauaaaggguugga

SEQ ID NO: 32673 - RNA, 22 nt, Artificial Sequence
  RPE65 RNA guide
agaugccccagaguguggauaa

SEQ ID NO: 32674 - RNA, 22 nt, Artificial Sequence
  RPE65 RNA guide
agaugcuucucccucacuccuu

SEQ ID NO: 32675 - RNA, 22 nt, Artificial Sequence
  RPE65 RNA guide
agauggcaaaaggcaaauggau

SEQ ID NO: 32676 - RNA, 22 nt, Artificial Sequence
  RPE65 RNA guide
agauuuccccaaacaccaaucc

SEQ ID NO: 32677 - RNA, 22 nt, Artificial Sequence
  RPE65 RNA guide
agauuuuaaagagccaggauuc

SEQ ID NO: 32678 - RNA, 22 nt, Artificial Sequence
  RPE65 RNA guide
agcaauguucugucuccccuuc

SEQ ID NO: 32679 - RNA, 22 nt, Artificial Sequence
  RPE65 RNA guide
agcacuuagaaaaugucugcug

SEQ ID NO: 32680 - RNA, 22 nt, Artificial Sequence
  RPE65 RNA guide
agcagacauuuucuaagugcug

SEQ ID NO: 32681 - RNA, 22 nt, Artificial Sequence
  RPE65 RNA guide
agcagccugauugggcagcuuc

SEQ ID NO: 32682 - RNA, 22 nt, Artificial Sequence
  RPE65 RNA guide
agcaucuugagaggauugggac

SEQ ID NO: 32683 - RNA, 22 nt, Artificial Sequence
  RPE65 RNA guide
agccaggauuccuguuuuuuca

SEQ ID NO: 32684 - RNA, 22 nt, Artificial Sequence
  RPE65 RNA guide
agcccaaggcagggauaagaag

SEQ ID NO: 32685 - RNA, 22 nt, Artificial Sequence
  RPE65 RNA guide
agcccucgcgcuggacagcacu

SEQ ID NO: 32686 - RNA, 22 nt, Artificial Sequence
  RPE65 RNA guide
agccuagcccaaggcagggaua

SEQ ID NO: 32687 - RNA, 22 nt, Artificial Sequence
  RPE65 RNA guide
agccugauugggcagcuucuuc

SEQ ID NO: 32688 - RNA, 22 nt, Artificial Sequence
  RPE65 RNA guide
agcgcgagggcuggaaaugaaa

SEQ ID NO: 32689 - RNA, 22 nt, Artificial Sequence
  RPE65 RNA guide
agcucuagauuuuaaagagcca

SEQ ID NO: 32690 - RNA, 22 nt, Artificial Sequence
  RPE65 RNA guide
agcucuaugaggaagaagcugc

SEQ ID NO: 32691 - RNA, 22 nt, Artificial Sequence
  RPE65 RNA guide
agcugcccaaucaggcugcuga

SEQ ID NO: 32692 - RNA, 22 nt, Artificial Sequence
  RPE65 RNA guide
agcuggcagugauuuucauuuc

SEQ ID NO: 32693 - RNA, 22 nt, Artificial Sequence
  RPE65 RNA guide
agcuucuuccucauagagcugg

SEQ ID NO: 32694 - RNA, 22 nt, Artificial Sequence
  RPE65 RNA guide
aggaagaagcugcccaaucagg

SEQ ID NO: 32695 - RNA, 22 nt, Artificial Sequence
  RPE65 RNA guide
aggaauccuggcucuuuaaaau

SEQ ID NO: 32696 - RNA, 22 nt, Artificial Sequence
  RPE65 RNA guide
aggacaagccuagcccaaggca

SEQ ID NO: 32697 - RNA, 22 nt, Artificial Sequence
  RPE65 RNA guide
aggagugagggagaagcaucuu

SEQ ID NO: 32698 - RNA, 22 nt, Artificial Sequence
  RPE65 RNA guide
aggauugggacucuccaccuaa

SEQ ID NO: 32699 - RNA, 22 nt, Artificial Sequence
  RPE65 RNA guide
aggcaaauggauugguguuugg

SEQ ID NO: 32700 - RNA, 22 nt, Artificial Sequence
  RPE65 RNA guide
aggcagaguauaucagcagccu

SEQ ID NO: 32701 - RNA, 22 nt, Artificial Sequence
  RPE65 RNA guide
aggcagggauaagaagcaaugu

SEQ ID NO: 32702 - RNA, 22 nt, Artificial Sequence
  RPE65 RNA guide
aggcugcugauauacucugccu

SEQ ID NO: 32703 - RNA, 22 nt, Artificial Sequence
  RPE65 RNA guide
aggcuuguccuugguaaggcag

SEQ ID NO: 32704 - RNA, 22 nt, Artificial Sequence
  RPE65 RNA guide
agggagaagcaucuugagagga

SEQ ID NO: 32705 - RNA, 22 nt, Artificial Sequence
  RPE65 RNA guide
agggauaagaagcaauguucug

SEQ ID NO: 32706 - RNA, 22 nt, Artificial Sequence
  RPE65 RNA guide
agggcuggaaaugaaaaucacu

SEQ ID NO: 32707 - RNA, 22 nt, Artificial Sequence
  RPE65 RNA guide
aggggagacagaacauugcuuc

SEQ ID NO: 32708 - RNA, 22 nt, Artificial Sequence
  RPE65 RNA guide
aggguuggaaggagugagggag

SEQ ID NO: 32709 - RNA, 22 nt, Artificial Sequence
  RPE65 RNA guide
aggugagucaagucagcagaca

SEQ ID NO: 32710 - RNA, 22 nt, Artificial Sequence
  RPE65 RNA guide
agguggagagucccaauccucu

SEQ ID NO: 32711 - RNA, 22 nt, Artificial Sequence
  RPE65 RNA guide
aggugugaucuccuagugaagg

SEQ ID NO: 32712 - RNA, 22 nt, Artificial Sequence
  RPE65 RNA guide
aguauaucagcagccugauugg

SEQ ID NO: 32713 - RNA, 22 nt, Artificial Sequence
  RPE65 RNA guide
agucaagucagcagacauuuuc

SEQ ID NO: 32714 - RNA, 22 nt, Artificial Sequence
  RPE65 RNA guide
agucagcagacauuuucuaagu

SEQ ID NO: 32715 - RNA, 22 nt, Artificial Sequence
  RPE65 RNA guide
agucccaauccucucaagaugc

SEQ ID NO: 32716 - RNA, 22 nt, Artificial Sequence
  RPE65 RNA guide
agugaaggugagucaagucagc

SEQ ID NO: 32717 - RNA, 22 nt, Artificial Sequence
  RPE65 RNA guide
agugagggagaagcaucuugag

SEQ ID NO: 32718 - RNA, 22 nt, Artificial Sequence
  RPE65 RNA guide
agugauuuucauuuccagcccu

SEQ ID NO: 32719 - RNA, 22 nt, Artificial Sequence
  RPE65 RNA guide
agugcuguccagcgcgagggcu

SEQ ID NO: 32720 - RNA, 22 nt, Artificial Sequence
  RPE65 RNA guide
aguguggauaaaggguuggaag

SEQ ID NO: 32721 - RNA, 22 nt, Artificial Sequence
  RPE65 RNA guide
auaaaggguuggaaggagugag

SEQ ID NO: 32722 - RNA, 22 nt, Artificial Sequence
  RPE65 RNA guide
auaagaagcaauguucugucuc

SEQ ID NO: 32723 - RNA, 22 nt, Artificial Sequence
  RPE65 RNA guide
auacucugccuuaccaaggaca

SEQ ID NO: 32724 - RNA, 22 nt, Artificial Sequence
  RPE65 RNA guide
auagagcuggcagugauuuuca

SEQ ID NO: 32725 - RNA, 22 nt, Artificial Sequence
  RPE65 RNA guide
auagauuuccccaaacaccaau

SEQ ID NO: 32726 - RNA, 22 nt, Artificial Sequence
  RPE65 RNA guide
auagcucuagauuuuaaagagc

SEQ ID NO: 32727 - RNA, 22 nt, Artificial Sequence
  RPE65 RNA guide
auauacucugccuuaccaagga

SEQ ID NO: 32728 - RNA, 22 nt, Artificial Sequence
  RPE65 RNA guide
auauauuuuaguggagugagga

SEQ ID NO: 32729 - RNA, 22 nt, Artificial Sequence
  RPE65 RNA guide
auaucagcagccugauugggca

SEQ ID NO: 32730 - RNA, 22 nt, Artificial Sequence
  RPE65 RNA guide
auauuuuaguggagugaggagu

SEQ ID NO: 32731 - RNA, 22 nt, Artificial Sequence
  RPE65 RNA guide
aucacugccagcucuaugagga

SEQ ID NO: 32732 - RNA, 22 nt, Artificial Sequence
  RPE65 RNA guide
aucagcagccugauugggcagc

SEQ ID NO: 32733 - RNA, 22 nt, Artificial Sequence
  RPE65 RNA guide
aucaggcugcugauauacucug

SEQ ID NO: 32734 - RNA, 22 nt, Artificial Sequence
  RPE65 RNA guide
auccauuugccuuuugccaucu

SEQ ID NO: 32735 - RNA, 22 nt, Artificial Sequence
  RPE65 RNA guide
aucccugccuugggcuaggcuu

SEQ ID NO: 32736 - RNA, 22 nt, Artificial Sequence
  RPE65 RNA guide
auccucucaagaugcuucuccc

SEQ ID NO: 32737 - RNA, 22 nt, Artificial Sequence
  RPE65 RNA guide
auccuggcucuuuaaaaucuag

SEQ ID NO: 32738 - RNA, 22 nt, Artificial Sequence
  RPE65 RNA guide
aucuauuagguggagaguccca

SEQ ID NO: 32739 - RNA, 22 nt, Artificial Sequence
  RPE65 RNA guide
aucuccuagugaaggugaguca

SEQ ID NO: 32740 - RNA, 22 nt, Artificial Sequence
  RPE65 RNA guide
aucuugagaggauugggacucu

SEQ ID NO: 32741 - RNA, 22 nt, Artificial Sequence
  RPE65 RNA guide
augaaaaaacaggaauccuggc

SEQ ID NO: 32742 - RNA, 22 nt, Artificial Sequence
  RPE65 RNA guide
augaaaaucacugccagcucua

SEQ ID NO: 32743 - RNA, 22 nt, Artificial Sequence
  RPE65 RNA guide
augaaggggagacagaacauug

SEQ ID NO: 32744 - RNA, 22 nt, Artificial Sequence
  RPE65 RNA guide
augagauggcaaaaggcaaaug

SEQ ID NO: 32745 - RNA, 22 nt, Artificial Sequence
  RPE65 RNA guide
augaggaagaagcugcccaauc

SEQ ID NO: 32746 - RNA, 22 nt, Artificial Sequence
  RPE65 RNA guide
augccccagaguguggauaaag

SEQ ID NO: 32747 - RNA, 22 nt, Artificial Sequence
  RPE65 RNA guide
augcuucucccucacuccuucc

SEQ ID NO: 32748 - RNA, 22 nt, Artificial Sequence
  RPE65 RNA guide
auggauugguguuuggggaaau

SEQ ID NO: 32749 - RNA, 22 nt, Artificial Sequence
  RPE65 RNA guide
auggcaaaaggcaaauggauug

SEQ ID NO: 32750 - RNA, 22 nt, Artificial Sequence
  RPE65 RNA guide
augucugcugacuugacucacc

SEQ ID NO: 32751 - RNA, 22 nt, Artificial Sequence
  RPE65 RNA guide
auuagguggagagucccaaucc

SEQ ID NO: 32752 - RNA, 22 nt, Artificial Sequence
  RPE65 RNA guide
auugcuucuuaucccugccuug

SEQ ID NO: 32753 - RNA, 22 nt, Artificial Sequence
  RPE65 RNA guide
auugggacucuccaccuaauag

SEQ ID NO: 32754 - RNA, 22 nt, Artificial Sequence
  RPE65 RNA guide
auugggcagcuucuuccucaua

SEQ ID NO: 32755 - RNA, 22 nt, Artificial Sequence
  RPE65 RNA guide
auugguguuuggggaaaucuau

SEQ ID NO: 32756 - RNA, 22 nt, Artificial Sequence
  RPE65 RNA guide
auuuccagcccucgcgcuggac

SEQ ID NO: 32757 - RNA, 22 nt, Artificial Sequence
  RPE65 RNA guide
auuucccaaggugugaucuccu

SEQ ID NO: 32758 - RNA, 22 nt, Artificial Sequence
  RPE65 RNA guide
auuuccccaaacaccaauccau

SEQ ID NO: 32759 - RNA, 22 nt, Artificial Sequence
  RPE65 RNA guide
auuugccuuuugccaucucauu

SEQ ID NO: 32760 - RNA, 22 nt, Artificial Sequence
  RPE65 RNA guide
auuuuaaagagccaggauuccu

SEQ ID NO: 32761 - RNA, 22 nt, Artificial Sequence
  RPE65 RNA guide
auuuucauuuccagcccucgcg

SEQ ID NO: 32762 - RNA, 22 nt, Artificial Sequence
  RPE65 RNA guide
auuuucuaagugcuguccagcg

SEQ ID NO: 32763 - RNA, 22 nt, Artificial Sequence
  RPE65 RNA guide
caaaaggcaaauggauuggugu

SEQ ID NO: 32764 - RNA, 22 nt, Artificial Sequence
  RPE65 RNA guide
caaacaccaauccauuugccuu

SEQ ID NO: 32765 - RNA, 22 nt, Artificial Sequence
  RPE65 RNA guide
caaauggauugguguuugggga

SEQ ID NO: 32766 - RNA, 22 nt, Artificial Sequence
  RPE65 RNA guide
caacccuuuauccacacucugg

SEQ ID NO: 32767 - RNA, 22 nt, Artificial Sequence
  RPE65 RNA guide
caagaugcuucucccucacucc

SEQ ID NO: 32768 - RNA, 22 nt, Artificial Sequence
  RPE65 RNA guide
caagccuagcccaaggcaggga

SEQ ID NO: 32769 - RNA, 22 nt, Artificial Sequence
  RPE65 RNA guide
caaggacaagccuagcccaagg

SEQ ID NO: 32770 - RNA, 22 nt, Artificial Sequence
  RPE65 RNA guide
caaggcagggauaagaagcaau

SEQ ID NO: 32771 - RNA, 22 nt, Artificial Sequence
  RPE65 RNA guide
caaggugugaucuccuagugaa

SEQ ID NO: 32772 - RNA, 22 nt, Artificial Sequence
  RPE65 RNA guide
caagucagcagacauuuucuaa

SEQ ID NO: 32773 - RNA, 22 nt, Artificial Sequence
  RPE65 RNA guide
caaucaggcugcugauauacuc

SEQ ID NO: 32774 - RNA, 22 nt, Artificial Sequence
  RPE65 RNA guide
caauccauuugccuuuugccau

SEQ ID NO: 32775 - RNA, 22 nt, Artificial Sequence
  RPE65 RNA guide
caauccucucaagaugcuucuc

SEQ ID NO: 32776 - RNA, 22 nt, Artificial Sequence
  RPE65 RNA guide
caauguucugucuccccuucau

SEQ ID NO: 32777 - RNA, 22 nt, Artificial Sequence
  RPE65 RNA guide
caccaauccauuugccuuuugc

SEQ ID NO: 32778 - RNA, 22 nt, Artificial Sequence
  RPE65 RNA guide
caccuaauagauuuccccaaac

SEQ ID NO: 32779 - RNA, 22 nt, Artificial Sequence
  RPE65 RNA guide
caccuucacuaggagaucacac

SEQ ID NO: 32780 - RNA, 22 nt, Artificial Sequence
  RPE65 RNA guide
cacuccuuccaacccuuuaucc

SEQ ID NO: 32781 - RNA, 22 nt, Artificial Sequence
  RPE65 RNA guide
cacugccagcucuaugaggaag

SEQ ID NO: 32782 - RNA, 22 nt, Artificial Sequence
  RPE65 RNA guide
cacuuagaaaaugucugcugac

SEQ ID NO: 32783 - RNA, 22 nt, Artificial Sequence
  RPE65 RNA guide
cagaacauugcuucuuaucccu

SEQ ID NO: 32784 - RNA, 22 nt, Artificial Sequence
  RPE65 RNA guide
cagacauuuucuaagugcuguc

SEQ ID NO: 32785 - RNA, 22 nt, Artificial Sequence
  RPE65 RNA guide
cagaguauaucagcagccugau

SEQ ID NO: 32786 - RNA, 22 nt, Artificial Sequence
  RPE65 RNA guide
cagaguguggauaaaggguugg

SEQ ID NO: 32787 - RNA, 22 nt, Artificial Sequence
  RPE65 RNA guide
cagcacuuagaaaaugucugcu

SEQ ID NO: 32788 - RNA, 22 nt, Artificial Sequence
  RPE65 RNA guide
cagcagacauuuucuaagugcu

SEQ ID NO: 32789 - RNA, 22 nt, Artificial Sequence
  RPE65 RNA guide
cagcagccugauugggcagcuu

SEQ ID NO: 32790 - RNA, 22 nt, Artificial Sequence
  RPE65 RNA guide
cagcccucgcgcuggacagcac

SEQ ID NO: 32791 - RNA, 22 nt, Artificial Sequence
  RPE65 RNA guide
cagccugauugggcagcuucuu

SEQ ID NO: 32792 - RNA, 22 nt, Artificial Sequence
  RPE65 RNA guide
cagcgcgagggcuggaaaugaa

SEQ ID NO: 32793 - RNA, 22 nt, Artificial Sequence
  RPE65 RNA guide
cagcucuaugaggaagaagcug

SEQ ID NO: 32794 - RNA, 22 nt, Artificial Sequence
  RPE65 RNA guide
cagcuucuuccucauagagcug

SEQ ID NO: 32795 - RNA, 22 nt, Artificial Sequence
  RPE65 RNA guide
caggaauccuggcucuuuaaaa

SEQ ID NO: 32796 - RNA, 22 nt, Artificial Sequence
  RPE65 RNA guide
caggcugcugauauacucugcc

SEQ ID NO: 32797 - RNA, 22 nt, Artificial Sequence
  RPE65 RNA guide
cagggauaagaagcaauguucu

SEQ ID NO: 32798 - RNA, 22 nt, Artificial Sequence
  RPE65 RNA guide
cagugauuuucauuuccagccc

SEQ ID NO: 32799 - RNA, 22 nt, Artificial Sequence
  RPE65 RNA guide
cauagagcuggcagugauuuuc

SEQ ID NO: 32800 - RNA, 22 nt, Artificial Sequence
  RPE65 RNA guide
caucuugagaggauugggacuc

SEQ ID NO: 32801 - RNA, 22 nt, Artificial Sequence
  RPE65 RNA guide
cauugcuucuuaucccugccuu

SEQ ID NO: 32802 - RNA, 22 nt, Artificial Sequence
  RPE65 RNA guide
cauuuccagcccucgcgcugga

SEQ ID NO: 32803 - RNA, 22 nt, Artificial Sequence
  RPE65 RNA guide
cauuugccuuuugccaucucau

SEQ ID NO: 32804 - RNA, 22 nt, Artificial Sequence
  RPE65 RNA guide
cauuuucuaagugcuguccagc

SEQ ID NO: 32805 - RNA, 22 nt, Artificial Sequence
  RPE65 RNA guide
ccaaacaccaauccauuugccu

SEQ ID NO: 32806 - RNA, 22 nt, Artificial Sequence
  RPE65 RNA guide
ccaacccuuuauccacacucug

SEQ ID NO: 32807 - RNA, 22 nt, Artificial Sequence
  RPE65 RNA guide
ccaaggacaagccuagcccaag

SEQ ID NO: 32808 - RNA, 22 nt, Artificial Sequence
  RPE65 RNA guide
ccaaggcagggauaagaagcaa

SEQ ID NO: 32809 - RNA, 22 nt, Artificial Sequence
  RPE65 RNA guide
ccaaggugugaucuccuaguga

SEQ ID NO: 32810 - RNA, 22 nt, Artificial Sequence
  RPE65 RNA guide
ccaaucaggcugcugauauacu

SEQ ID NO: 32811 - RNA, 22 nt, Artificial Sequence
  RPE65 RNA guide
ccaauccauuugccuuuugcca

SEQ ID NO: 32812 - RNA, 22 nt, Artificial Sequence
  RPE65 RNA guide
ccaauccucucaagaugcuucu

SEQ ID NO: 32813 - RNA, 22 nt, Artificial Sequence
  RPE65 RNA guide
ccaccuaauagauuuccccaaa

SEQ ID NO: 32814 - RNA, 22 nt, Artificial Sequence
  RPE65 RNA guide
ccagaguguggauaaaggguug

SEQ ID NO: 32815 - RNA, 22 nt, Artificial Sequence
  RPE65 RNA guide
ccagcccucgcgcuggacagca

SEQ ID NO: 32816 - RNA, 22 nt, Artificial Sequence
  RPE65 RNA guide
ccagcgcgagggcuggaaauga

SEQ ID NO: 32817 - RNA, 22 nt, Artificial Sequence
  RPE65 RNA guide
ccagcucuaugaggaagaagcu

SEQ ID NO: 32818 - RNA, 22 nt, Artificial Sequence
  RPE65 RNA guide
ccaggauuccuguuuuuucauu

SEQ ID NO: 32819 - RNA, 22 nt, Artificial Sequence
  RPE65 RNA guide
ccauuugccuuuugccaucuca

SEQ ID NO: 32820 - RNA, 22 nt, Artificial Sequence
  RPE65 RNA guide
cccaaacaccaauccauuugcc

SEQ ID NO: 32821 - RNA, 22 nt, Artificial Sequence
  RPE65 RNA guide
cccaaggcagggauaagaagca

SEQ ID NO: 32822 - RNA, 22 nt, Artificial Sequence
  RPE65 RNA guide
cccaaggugugaucuccuagug

SEQ ID NO: 32823 - RNA, 22 nt, Artificial Sequence
  RPE65 RNA guide
cccaaucaggcugcugauauac

SEQ ID NO: 32824 - RNA, 22 nt, Artificial Sequence
  RPE65 RNA guide
cccaauccucucaagaugcuuc

SEQ ID NO: 32825 - RNA, 22 nt, Artificial Sequence
  RPE65 RNA guide
cccagaguguggauaaaggguu

SEQ ID NO: 32826 - RNA, 22 nt, Artificial Sequence
  RPE65 RNA guide
ccccaaacaccaauccauuugc

SEQ ID NO: 32827 - RNA, 22 nt, Artificial Sequence
  RPE65 RNA guide
ccccagaguguggauaaagggu

SEQ ID NO: 32828 - RNA, 22 nt, Artificial Sequence
  RPE65 RNA guide
cccucacuccuuccaacccuuu

SEQ ID NO: 32829 - RNA, 22 nt, Artificial Sequence
  RPE65 RNA guide
cccucgcgcuggacagcacuua

SEQ ID NO: 32830 - RNA, 22 nt, Artificial Sequence
  RPE65 RNA guide
cccugccuugggcuaggcuugu

SEQ ID NO: 32831 - RNA, 22 nt, Artificial Sequence
  RPE65 RNA guide
cccuuuauccacacucuggggc

SEQ ID NO: 32832 - RNA, 22 nt, Artificial Sequence
  RPE65 RNA guide
ccuaauagauuuccccaaacac

SEQ ID NO: 32833 - RNA, 22 nt, Artificial Sequence
  RPE65 RNA guide
ccuagcccaaggcagggauaag

SEQ ID NO: 32834 - RNA, 22 nt, Artificial Sequence
  RPE65 RNA guide
ccuagugaaggugagucaaguc

SEQ ID NO: 32835 - RNA, 22 nt, Artificial Sequence
  RPE65 RNA guide
ccucacuccacuaaaauauauc

SEQ ID NO: 32836 - RNA, 22 nt, Artificial Sequence
  RPE65 RNA guide
ccucacuccuuccaacccuuua

SEQ ID NO: 32837 - RNA, 22 nt, Artificial Sequence
  RPE65 RNA guide
ccucauagagcuggcagugauu

SEQ ID NO: 32838 - RNA, 22 nt, Artificial Sequence
  RPE65 RNA guide
ccucgcgcuggacagcacuuag

SEQ ID NO: 32839 - RNA, 22 nt, Artificial Sequence
  RPE65 RNA guide
ccucucaagaugcuucucccuc

SEQ ID NO: 32840 - RNA, 22 nt, Artificial Sequence
  RPE65 RNA guide
ccugauugggcagcuucuuccu

SEQ ID NO: 32841 - RNA, 22 nt, Artificial Sequence
  RPE65 RNA guide
ccugccuugggcuaggcuuguc

SEQ ID NO: 32842 - RNA, 22 nt, Artificial Sequence
  RPE65 RNA guide
ccuggcucuuuaaaaucuagag

SEQ ID NO: 32843 - RNA, 22 nt, Artificial Sequence
  RPE65 RNA guide
ccuuaccaaggacaagccuagc

SEQ ID NO: 32844 - RNA, 22 nt, Artificial Sequence
  RPE65 RNA guide
ccuucacuaggagaucacaccu

SEQ ID NO: 32845 - RNA, 22 nt, Artificial Sequence
  RPE65 RNA guide
ccuuccaacccuuuauccacac

SEQ ID NO: 32846 - RNA, 22 nt, Artificial Sequence
  RPE65 RNA guide
ccuugggcuaggcuuguccuug

SEQ ID NO: 32847 - RNA, 22 nt, Artificial Sequence
  RPE65 RNA guide
ccuugguaaggcagaguauauc

SEQ ID NO: 32848 - RNA, 22 nt, Artificial Sequence
  RPE65 RNA guide
ccuuuauccacacucuggggca

SEQ ID NO: 32849 - RNA, 22 nt, Artificial Sequence
  RPE65 RNA guide
ccuuuugccaucucauuuuuaa

SEQ ID NO: 32850 - RNA, 22 nt, Artificial Sequence
  RPE65 RNA guide
cgagggcuggaaaugaaaauca

SEQ ID NO: 32851 - RNA, 22 nt, Artificial Sequence
  RPE65 RNA guide
cgcgagggcuggaaaugaaaau

SEQ ID NO: 32852 - RNA, 22 nt, Artificial Sequence
  RPE65 RNA guide
cgcgcuggacagcacuuagaaa

SEQ ID NO: 32853 - RNA, 22 nt, Artificial Sequence
  RPE65 RNA guide
cgcuggacagcacuuagaaaau

SEQ ID NO: 32854 - RNA, 22 nt, Artificial Sequence
  RPE65 RNA guide
cuaagugcuguccagcgcgagg

SEQ ID NO: 32855 - RNA, 22 nt, Artificial Sequence
  RPE65 RNA guide
cuaauagauuuccccaaacacc

SEQ ID NO: 32856 - RNA, 22 nt, Artificial Sequence
  RPE65 RNA guide
cuacuccucacuccacuaaaau

SEQ ID NO: 32857 - RNA, 22 nt, Artificial Sequence
  RPE65 RNA guide
cuagauuuuaaagagccaggau

SEQ ID NO: 32858 - RNA, 22 nt, Artificial Sequence
  RPE65 RNA guide
cuagcccaaggcagggauaaga

SEQ ID NO: 32859 - RNA, 22 nt, Artificial Sequence
  RPE65 RNA guide
cuaggcuuguccuugguaaggc

SEQ ID NO: 32860 - RNA, 22 nt, Artificial Sequence
  RPE65 RNA guide
cuagugaaggugagucaaguca

SEQ ID NO: 32861 - RNA, 22 nt, Artificial Sequence
  RPE65 RNA guide
cuaugaggaagaagcugcccaa

SEQ ID NO: 32862 - RNA, 22 nt, Artificial Sequence
  RPE65 RNA guide
cuauuagguggagagucccaau

SEQ ID NO: 32863 - RNA, 22 nt, Artificial Sequence
  RPE65 RNA guide
cucaagaugcuucucccucacu

SEQ ID NO: 32864 - RNA, 22 nt, Artificial Sequence
  RPE65 RNA guide
cucaccuucacuaggagaucac

SEQ ID NO: 32865 - RNA, 22 nt, Artificial Sequence
  RPE65 RNA guide
cucacuccacuaaaauauauca

SEQ ID NO: 32866 - RNA, 22 nt, Artificial Sequence
  RPE65 RNA guide
cucacuccuuccaacccuuuau

SEQ ID NO: 32867 - RNA, 22 nt, Artificial Sequence
  RPE65 RNA guide
cucauagagcuggcagugauuu

SEQ ID NO: 32868 - RNA, 22 nt, Artificial Sequence
  RPE65 RNA guide
cuccaccuaauagauuucccca

SEQ ID NO: 32869 - RNA, 22 nt, Artificial Sequence
  RPE65 RNA guide
cucccucacuccuuccaacccu

SEQ ID NO: 32870 - RNA, 22 nt, Artificial Sequence
  RPE65 RNA guide
cuccuagugaaggugagucaag

SEQ ID NO: 32871 - RNA, 22 nt, Artificial Sequence
  RPE65 RNA guide
cuccucacuccacuaaaauaua

SEQ ID NO: 32872 - RNA, 22 nt, Artificial Sequence
  RPE65 RNA guide
cuccuuccaacccuuuauccac

SEQ ID NO: 32873 - RNA, 22 nt, Artificial Sequence
  RPE65 RNA guide
cucgcgcuggacagcacuuaga

SEQ ID NO: 32874 - RNA, 22 nt, Artificial Sequence
  RPE65 RNA guide
cucuagauuuuaaagagccagg

SEQ ID NO: 32875 - RNA, 22 nt, Artificial Sequence
  RPE65 RNA guide
cucuaugaggaagaagcugccc

SEQ ID NO: 32876 - RNA, 22 nt, Artificial Sequence
  RPE65 RNA guide
cucucaagaugcuucucccuca

SEQ ID NO: 32877 - RNA, 22 nt, Artificial Sequence
  RPE65 RNA guide
cucuccaccuaauagauuuccc

SEQ ID NO: 32878 - RNA, 22 nt, Artificial Sequence
  RPE65 RNA guide
cucugccuuaccaaggacaagc

SEQ ID NO: 32879 - RNA, 22 nt, Artificial Sequence
  RPE65 RNA guide
cugacuugacucaccuucacua

SEQ ID NO: 32880 - RNA, 22 nt, Artificial Sequence
  RPE65 RNA guide
cugauauacucugccuuaccaa

SEQ ID NO: 32881 - RNA, 22 nt, Artificial Sequence
  RPE65 RNA guide
cugauugggcagcuucuuccuc

SEQ ID NO: 32882 - RNA, 22 nt, Artificial Sequence
  RPE65 RNA guide
cugccagcucuaugaggaagaa

SEQ ID NO: 32883 - RNA, 22 nt, Artificial Sequence
  RPE65 RNA guide
cugcccaaucaggcugcugaua

SEQ ID NO: 32884 - RNA, 22 nt, Artificial Sequence
  RPE65 RNA guide
cugccuuaccaaggacaagccu

SEQ ID NO: 32885 - RNA, 22 nt, Artificial Sequence
  RPE65 RNA guide
cugccuugggcuaggcuugucc

SEQ ID NO: 32886 - RNA, 22 nt, Artificial Sequence
  RPE65 RNA guide
cugcugacuugacucaccuuca

SEQ ID NO: 32887 - RNA, 22 nt, Artificial Sequence
  RPE65 RNA guide
cugcugauauacucugccuuac

SEQ ID NO: 32888 - RNA, 22 nt, Artificial Sequence
  RPE65 RNA guide
cuggaaaugaaaaucacugcca

SEQ ID NO: 32889 - RNA, 22 nt, Artificial Sequence
  RPE65 RNA guide
cuggacagcacuuagaaaaugu

SEQ ID NO: 32890 - RNA, 22 nt, Artificial Sequence
  RPE65 RNA guide
cuggcagugauuuucauuucca

SEQ ID NO: 32891 - RNA, 22 nt, Artificial Sequence
  RPE65 RNA guide
cuguccagcgcgagggcuggaa

SEQ ID NO: 32892 - RNA, 22 nt, Artificial Sequence
  RPE65 RNA guide
cugugaugaaggggagacagaa

SEQ ID NO: 32893 - RNA, 22 nt, Artificial Sequence
  RPE65 RNA guide
cuuaaaaaugagauggcaaaag

SEQ ID NO: 32894 - RNA, 22 nt, Artificial Sequence
  RPE65 RNA guide
cuuaccaaggacaagccuagcc

SEQ ID NO: 32895 - RNA, 22 nt, Artificial Sequence
  RPE65 RNA guide
cuuagaaaaugucugcugacuu

SEQ ID NO: 32896 - RNA, 22 nt, Artificial Sequence
  RPE65 RNA guide
cuuaucccugccuugggcuagg

SEQ ID NO: 32897 - RNA, 22 nt, Artificial Sequence
  RPE65 RNA guide
cuucacuaggagaucacaccuu

SEQ ID NO: 32898 - RNA, 22 nt, Artificial Sequence
  RPE65 RNA guide
cuuccaacccuuuauccacacu

SEQ ID NO: 32899 - RNA, 22 nt, Artificial Sequence
  RPE65 RNA guide
cuuccucauagagcuggcagug

SEQ ID NO: 32900 - RNA, 22 nt, Artificial Sequence
  RPE65 RNA guide
cuucuacuccucacuccacuaa

SEQ ID NO: 32901 - RNA, 22 nt, Artificial Sequence
  RPE65 RNA guide
cuucucccucacuccuuccaac

SEQ ID NO: 32902 - RNA, 22 nt, Artificial Sequence
  RPE65 RNA guide
cuucuuaaaaaugagauggcaa

SEQ ID NO: 32903 - RNA, 22 nt, Artificial Sequence
  RPE65 RNA guide
cuucuuaucccugccuugggcu

SEQ ID NO: 32904 - RNA, 22 nt, Artificial Sequence
  RPE65 RNA guide
cuucuuccucauagagcuggca

SEQ ID NO: 32905 - RNA, 22 nt, Artificial Sequence
  RPE65 RNA guide
cuugacucaccuucacuaggag

SEQ ID NO: 32906 - RNA, 22 nt, Artificial Sequence
  RPE65 RNA guide
cuugagaggauugggacucucc

SEQ ID NO: 32907 - RNA, 22 nt, Artificial Sequence
  RPE65 RNA guide
cuugauauauuuuaguggagug

SEQ ID NO: 32908 - RNA, 22 nt, Artificial Sequence
  RPE65 RNA guide
cuugggcuaggcuuguccuugg

SEQ ID NO: 32909 - RNA, 22 nt, Artificial Sequence
  RPE65 RNA guide
cuugguaaggcagaguauauca

SEQ ID NO: 32910 - RNA, 22 nt, Artificial Sequence
  RPE65 RNA guide
cuuguccuugguaaggcagagu

SEQ ID NO: 32911 - RNA, 22 nt, Artificial Sequence
  RPE65 RNA guide
cuuuauccacacucuggggcau

SEQ ID NO: 32912 - RNA, 22 nt, Artificial Sequence
  RPE65 RNA guide
cuuuugccaucucauuuuuaag

SEQ ID NO: 32913 - RNA, 22 nt, Artificial Sequence
  RPE65 RNA guide
gaaaaaacaggaauccuggcuc

SEQ ID NO: 32914 - RNA, 22 nt, Artificial Sequence
  RPE65 RNA guide
gaaaaucacugccagcucuaug

SEQ ID NO: 32915 - RNA, 22 nt, Artificial Sequence
  RPE65 RNA guide
gaaaaucuucuuaaaaaugaga

SEQ ID NO: 32916 - RNA, 22 nt, Artificial Sequence
  RPE65 RNA guide
gaaaaugucugcugacuugacu

SEQ ID NO: 32917 - RNA, 22 nt, Artificial Sequence
  RPE65 RNA guide
gaaaucuauuagguggagaguc

SEQ ID NO: 32918 - RNA, 22 nt, Artificial Sequence
  RPE65 RNA guide
gaaaugaaaaucacugccagcu

SEQ ID NO: 32919 - RNA, 22 nt, Artificial Sequence
  RPE65 RNA guide
gaacauugcuucuuaucccugc

SEQ ID NO: 32920 - RNA, 22 nt, Artificial Sequence
  RPE65 RNA guide
gaagaagcugcccaaucaggcu

SEQ ID NO: 32921 - RNA, 22 nt, Artificial Sequence
  RPE65 RNA guide
gaagcaauguucugucuccccu

SEQ ID NO: 32922 - RNA, 22 nt, Artificial Sequence
  RPE65 RNA guide
gaagcaucuugagaggauuggg

SEQ ID NO: 32923 - RNA, 22 nt, Artificial Sequence
  RPE65 RNA guide
gaagcugcccaaucaggcugcu

SEQ ID NO: 32924 - RNA, 22 nt, Artificial Sequence
  RPE65 RNA guide
gaaggagugagggagaagcauc

SEQ ID NO: 32925 - RNA, 22 nt, Artificial Sequence
  RPE65 RNA guide
gaaggggagacagaacauugcu

SEQ ID NO: 32926 - RNA, 22 nt, Artificial Sequence
  RPE65 RNA guide
gaaggugagucaagucagcaga

SEQ ID NO: 32927 - RNA, 22 nt, Artificial Sequence
  RPE65 RNA guide
gaauccuggcucuuuaaaaucu

SEQ ID NO: 32928 - RNA, 22 nt, Artificial Sequence
  RPE65 RNA guide
gacaagccuagcccaaggcagg

SEQ ID NO: 32929 - RNA, 22 nt, Artificial Sequence
  RPE65 RNA guide
gacagaacauugcuucuuaucc

SEQ ID NO: 32930 - RNA, 22 nt, Artificial Sequence
  RPE65 RNA guide
gacagcacuuagaaaaugucug

SEQ ID NO: 32931 - RNA, 22 nt, Artificial Sequence
  RPE65 RNA guide
gacauuuucuaagugcugucca

SEQ ID NO: 32932 - RNA, 22 nt, Artificial Sequence
  RPE65 RNA guide
gacucaccuucacuaggagauc

SEQ ID NO: 32933 - RNA, 22 nt, Artificial Sequence
  RPE65 RNA guide
gacucuccaccuaauagauuuc

SEQ ID NO: 32934 - RNA, 22 nt, Artificial Sequence
  RPE65 RNA guide
gacuugacucaccuucacuagg

SEQ ID NO: 32935 - RNA, 22 nt, Artificial Sequence
  RPE65 RNA guide
gagaagcaucuugagaggauug

SEQ ID NO: 32936 - RNA, 22 nt, Artificial Sequence
  RPE65 RNA guide
gagacagaacauugcuucuuau

SEQ ID NO: 32937 - RNA, 22 nt, Artificial Sequence
  RPE65 RNA guide
gagaggauugggacucuccacc

SEQ ID NO: 32938 - RNA, 22 nt, Artificial Sequence
  RPE65 RNA guide
gagagucccaauccucucaaga

SEQ ID NO: 32939 - RNA, 22 nt, Artificial Sequence
  RPE65 RNA guide
gagaugccccagaguguggaua

SEQ ID NO: 32940 - RNA, 22 nt, Artificial Sequence
  RPE65 RNA guide
gagauggcaaaaggcaaaugga

SEQ ID NO: 32941 - RNA, 22 nt, Artificial Sequence
  RPE65 RNA guide
gagccaggauuccuguuuuuuc

SEQ ID NO: 32942 - RNA, 22 nt, Artificial Sequence
  RPE65 RNA guide
gagcuggcagugauuuucauuu

SEQ ID NO: 32943 - RNA, 22 nt, Artificial Sequence
  RPE65 RNA guide
gaggaagaagcugcccaaucag

SEQ ID NO: 32944 - RNA, 22 nt, Artificial Sequence
  RPE65 RNA guide
gaggauugggacucuccaccua

SEQ ID NO: 32945 - RNA, 22 nt, Artificial Sequence
  RPE65 RNA guide
gagggagaagcaucuugagagg

SEQ ID NO: 32946 - RNA, 22 nt, Artificial Sequence
  RPE65 RNA guide
gagggcuggaaaugaaaaucac

SEQ ID NO: 32947 - RNA, 22 nt, Artificial Sequence
  RPE65 RNA guide
gaguauaucagcagccugauug

SEQ ID NO: 32948 - RNA, 22 nt, Artificial Sequence
  RPE65 RNA guide
gagucaagucagcagacauuuu

SEQ ID NO: 32949 - RNA, 22 nt, Artificial Sequence
  RPE65 RNA guide
gagucccaauccucucaagaug

SEQ ID NO: 32950 - RNA, 22 nt, Artificial Sequence
  RPE65 RNA guide
gagugagggagaagcaucuuga

SEQ ID NO: 32951 - RNA, 22 nt, Artificial Sequence
  RPE65 RNA guide
gaguguggauaaaggguuggaa

SEQ ID NO: 32952 - RNA, 22 nt, Artificial Sequence
  RPE65 RNA guide
gauaaaggguuggaaggaguga

SEQ ID NO: 32953 - RNA, 22 nt, Artificial Sequence
  RPE65 RNA guide
gauaagaagcaauguucugucu

SEQ ID NO: 32954 - RNA, 22 nt, Artificial Sequence
  RPE65 RNA guide
gauauacucugccuuaccaagg

SEQ ID NO: 32955 - RNA, 22 nt, Artificial Sequence
  RPE65 RNA guide
gauauauuuuaguggagugagg

SEQ ID NO: 32956 - RNA, 22 nt, Artificial Sequence
  RPE65 RNA guide
gaucuccuagugaaggugaguc

SEQ ID NO: 32957 - RNA, 22 nt, Artificial Sequence
  RPE65 RNA guide
gaugaaggggagacagaacauu

SEQ ID NO: 32958 - RNA, 22 nt, Artificial Sequence
  RPE65 RNA guide
gaugccccagaguguggauaaa

SEQ ID NO: 32959 - RNA, 22 nt, Artificial Sequence
  RPE65 RNA guide
gaugcuucucccucacuccuuc

SEQ ID NO: 32960 - RNA, 22 nt, Artificial Sequence
  RPE65 RNA guide
gauggcaaaaggcaaauggauu

SEQ ID NO: 32961 - RNA, 22 nt, Artificial Sequence
  RPE65 RNA guide
gauugggacucuccaccuaaua

SEQ ID NO: 32962 - RNA, 22 nt, Artificial Sequence
  RPE65 RNA guide
gauugggcagcuucuuccucau

SEQ ID NO: 32963 - RNA, 22 nt, Artificial Sequence
  RPE65 RNA guide
gauugguguuuggggaaaucua

SEQ ID NO: 32964 - RNA, 22 nt, Artificial Sequence
  RPE65 RNA guide
gauuuccccaaacaccaaucca

SEQ ID NO: 32965 - RNA, 22 nt, Artificial Sequence
  RPE65 RNA guide
gauuuuaaagagccaggauucc

SEQ ID NO: 32966 - RNA, 22 nt, Artificial Sequence
  RPE65 RNA guide
gauuuucauuuccagcccucgc

SEQ ID NO: 32967 - RNA, 22 nt, Artificial Sequence
  RPE65 RNA guide
gcaaaaggcaaauggauuggug

SEQ ID NO: 32968 - RNA, 22 nt, Artificial Sequence
  RPE65 RNA guide
gcaaauggauugguguuugggg

SEQ ID NO: 32969 - RNA, 22 nt, Artificial Sequence
  RPE65 RNA guide
gcaauguucugucuccccuuca

SEQ ID NO: 32970 - RNA, 22 nt, Artificial Sequence
  RPE65 RNA guide
gcacuuagaaaaugucugcuga

SEQ ID NO: 32971 - RNA, 22 nt, Artificial Sequence
  RPE65 RNA guide
gcagacauuuucuaagugcugu

SEQ ID NO: 32972 - RNA, 22 nt, Artificial Sequence
  RPE65 RNA guide
gcagaguauaucagcagccuga

SEQ ID NO: 32973 - RNA, 22 nt, Artificial Sequence
  RPE65 RNA guide
gcagccugauugggcagcuucu

SEQ ID NO: 32974 - RNA, 22 nt, Artificial Sequence
  RPE65 RNA guide
gcagcuucuuccucauagagcu

SEQ ID NO: 32975 - RNA, 22 nt, Artificial Sequence
  RPE65 RNA guide
gcagggauaagaagcaauguuc

SEQ ID NO: 32976 - RNA, 22 nt, Artificial Sequence
  RPE65 RNA guide
gcagugauuuucauuuccagcc

SEQ ID NO: 32977 - RNA, 22 nt, Artificial Sequence
  RPE65 RNA guide
gcaucuugagaggauugggacu

SEQ ID NO: 32978 - RNA, 22 nt, Artificial Sequence
  RPE65 RNA guide
gccagcucuaugaggaagaagc

SEQ ID NO: 32979 - RNA, 22 nt, Artificial Sequence
  RPE65 RNA guide
gccaggauuccuguuuuuucau

SEQ ID NO: 32980 - RNA, 22 nt, Artificial Sequence
  RPE65 RNA guide
gccaucucauuuuuaagaagau

SEQ ID NO: 32981 - RNA, 22 nt, Artificial Sequence
  RPE65 RNA guide
gcccaaggcagggauaagaagc

SEQ ID NO: 32982 - RNA, 22 nt, Artificial Sequence
  RPE65 RNA guide
gcccaaucaggcugcugauaua

SEQ ID NO: 32983 - RNA, 22 nt, Artificial Sequence
  RPE65 RNA guide
gccccagaguguggauaaaggg

SEQ ID NO: 32984 - RNA, 22 nt, Artificial Sequence
  RPE65 RNA guide
gcccucgcgcuggacagcacuu

SEQ ID NO: 32985 - RNA, 22 nt, Artificial Sequence
  RPE65 RNA guide
gccuagcccaaggcagggauaa

SEQ ID NO: 32986 - RNA, 22 nt, Artificial Sequence
  RPE65 RNA guide
gccugauugggcagcuucuucc

SEQ ID NO: 32987 - RNA, 22 nt, Artificial Sequence
  RPE65 RNA guide
gccuuaccaaggacaagccuag

SEQ ID NO: 32988 - RNA, 22 nt, Artificial Sequence
  RPE65 RNA guide
gccuugggcuaggcuuguccuu

SEQ ID NO: 32989 - RNA, 22 nt, Artificial Sequence
  RPE65 RNA guide
gccuuuugccaucucauuuuua

SEQ ID NO: 32990 - RNA, 22 nt, Artificial Sequence
  RPE65 RNA guide
gcgagggcuggaaaugaaaauc

SEQ ID NO: 32991 - RNA, 22 nt, Artificial Sequence
  RPE65 RNA guide
gcgcgagggcuggaaaugaaaa

SEQ ID NO: 32992 - RNA, 22 nt, Artificial Sequence
  RPE65 RNA guide
gcgcuggacagcacuuagaaaa

SEQ ID NO: 32993 - RNA, 22 nt, Artificial Sequence
  RPE65 RNA guide
gcuaggcuuguccuugguaagg

SEQ ID NO: 32994 - RNA, 22 nt, Artificial Sequence
  RPE65 RNA guide
gcucuagauuuuaaagagccag

SEQ ID NO: 32995 - RNA, 22 nt, Artificial Sequence
  RPE65 RNA guide
gcucuaugaggaagaagcugcc

SEQ ID NO: 32996 - RNA, 22 nt, Artificial Sequence
  RPE65 RNA guide
gcugacuugacucaccuucacu

SEQ ID NO: 32997 - RNA, 22 nt, Artificial Sequence
  RPE65 RNA guide
gcugauauacucugccuuacca

SEQ ID NO: 32998 - RNA, 22 nt, Artificial Sequence
  RPE65 RNA guide
gcugcccaaucaggcugcugau

SEQ ID NO: 32999 - RNA, 22 nt, Artificial Sequence
  RPE65 RNA guide
gcugcugauauacucugccuua

SEQ ID NO: 33000 - RNA, 22 nt, Artificial Sequence
  RPE65 RNA guide
gcuggaaaugaaaaucacugcc

SEQ ID NO: 33001 - RNA, 22 nt, Artificial Sequence
  RPE65 RNA guide
gcuggacagcacuuagaaaaug

SEQ ID NO: 33002 - RNA, 22 nt, Artificial Sequence
  RPE65 RNA guide
gcuggcagugauuuucauuucc

SEQ ID NO: 33003 - RNA, 22 nt, Artificial Sequence
  RPE65 RNA guide
gcuguccagcgcgagggcugga

SEQ ID NO: 33004 - RNA, 22 nt, Artificial Sequence
  RPE65 RNA guide
gcuucucccucacuccuuccaa

SEQ ID NO: 33005 - RNA, 22 nt, Artificial Sequence
  RPE65 RNA guide
gcuucuuaucccugccuugggc

SEQ ID NO: 33006 - RNA, 22 nt, Artificial Sequence
  RPE65 RNA guide
gcuucuuccucauagagcuggc

SEQ ID NO: 33007 - RNA, 22 nt, Artificial Sequence
  RPE65 RNA guide
gcuuguccuugguaaggcagag

SEQ ID NO: 33008 - RNA, 22 nt, Artificial Sequence
  RPE65 RNA guide
ggaaaucuauuagguggagagu

SEQ ID NO: 33009 - RNA, 22 nt, Artificial Sequence
  RPE65 RNA guide
ggaaaugaaaaucacugccagc

SEQ ID NO: 33010 - RNA, 22 nt, Artificial Sequence
  RPE65 RNA guide
ggaagaagcugcccaaucaggc

SEQ ID NO: 33011 - RNA, 22 nt, Artificial Sequence
  RPE65 RNA guide
ggaaggagugagggagaagcau

SEQ ID NO: 33012 - RNA, 22 nt, Artificial Sequence
  RPE65 RNA guide
ggaauccuggcucuuuaaaauc

SEQ ID NO: 33013 - RNA, 22 nt, Artificial Sequence
  RPE65 RNA guide
ggacaagccuagcccaaggcag

SEQ ID NO: 33014 - RNA, 22 nt, Artificial Sequence
  RPE65 RNA guide
ggacagcacuuagaaaaugucu

SEQ ID NO: 33015 - RNA, 22 nt, Artificial Sequence
  RPE65 RNA guide
ggacucuccaccuaauagauuu

SEQ ID NO: 33016 - RNA, 22 nt, Artificial Sequence
  RPE65 RNA guide
ggagaagcaucuugagaggauu

SEQ ID NO: 33017 - RNA, 22 nt, Artificial Sequence
  RPE65 RNA guide
ggagacagaacauugcuucuua

SEQ ID NO: 33018 - RNA, 22 nt, Artificial Sequence
  RPE65 RNA guide
ggagagucccaauccucucaag

SEQ ID NO: 33019 - RNA, 22 nt, Artificial Sequence
  RPE65 RNA guide
ggagaugccccagaguguggau

SEQ ID NO: 33020 - RNA, 22 nt, Artificial Sequence
  RPE65 RNA guide
ggagugagggagaagcaucuug

SEQ ID NO: 33021 - RNA, 22 nt, Artificial Sequence
  RPE65 RNA guide
ggauaaaggguuggaaggagug

SEQ ID NO: 33022 - RNA, 22 nt, Artificial Sequence
  RPE65 RNA guide
ggauaagaagcaauguucuguc

SEQ ID NO: 33023 - RNA, 22 nt, Artificial Sequence
  RPE65 RNA guide
ggauugggacucuccaccuaau

SEQ ID NO: 33024 - RNA, 22 nt, Artificial Sequence
  RPE65 RNA guide
ggauugguguuuggggaaaucu

SEQ ID NO: 33025 - RNA, 22 nt, Artificial Sequence
  RPE65 RNA guide
ggcaaaaggcaaauggauuggu

SEQ ID NO: 33026 - RNA, 22 nt, Artificial Sequence
  RPE65 RNA guide
ggcaaauggauugguguuuggg

SEQ ID NO: 33027 - RNA, 22 nt, Artificial Sequence
  RPE65 RNA guide
ggcagaguauaucagcagccug

SEQ ID NO: 33028 - RNA, 22 nt, Artificial Sequence
  RPE65 RNA guide
ggcagcuucuuccucauagagc

SEQ ID NO: 33029 - RNA, 22 nt, Artificial Sequence
  RPE65 RNA guide
ggcagggauaagaagcaauguu

SEQ ID NO: 33030 - RNA, 22 nt, Artificial Sequence
  RPE65 RNA guide
ggcagugauuuucauuuccagc

SEQ ID NO: 33031 - RNA, 22 nt, Artificial Sequence
  RPE65 RNA guide
ggcuaggcuuguccuugguaag

SEQ ID NO: 33032 - RNA, 22 nt, Artificial Sequence
  RPE65 RNA guide
ggcugcugauauacucugccuu

SEQ ID NO: 33033 - RNA, 22 nt, Artificial Sequence
  RPE65 RNA guide
ggcuggaaaugaaaaucacugc

SEQ ID NO: 33034 - RNA, 22 nt, Artificial Sequence
  RPE65 RNA guide
ggcuuguccuugguaaggcaga

SEQ ID NO: 33035 - RNA, 22 nt, Artificial Sequence
  RPE65 RNA guide
gggaaaucuauuagguggagag

SEQ ID NO: 33036 - RNA, 22 nt, Artificial Sequence
  RPE65 RNA guide
gggacucuccaccuaauagauu

SEQ ID NO: 33037 - RNA, 22 nt, Artificial Sequence
  RPE65 RNA guide
gggagaagcaucuugagaggau

SEQ ID NO: 33038 - RNA, 22 nt, Artificial Sequence
  RPE65 RNA guide
gggagacagaacauugcuucuu

SEQ ID NO: 33039 - RNA, 22 nt, Artificial Sequence
  RPE65 RNA guide
gggauaagaagcaauguucugu

SEQ ID NO: 33040 - RNA, 22 nt, Artificial Sequence
  RPE65 RNA guide
gggcagcuucuuccucauagag

SEQ ID NO: 33041 - RNA, 22 nt, Artificial Sequence
  RPE65 RNA guide
gggcuaggcuuguccuugguaa

SEQ ID NO: 33042 - RNA, 22 nt, Artificial Sequence
  RPE65 RNA guide
gggcuggaaaugaaaaucacug

SEQ ID NO: 33043 - RNA, 22 nt, Artificial Sequence
  RPE65 RNA guide
ggggaaaucuauuagguggaga

SEQ ID NO: 33044 - RNA, 22 nt, Artificial Sequence
  RPE65 RNA guide
ggggagacagaacauugcuucu

SEQ ID NO: 33045 - RNA, 22 nt, Artificial Sequence
  RPE65 RNA guide
ggguuggaaggagugagggaga

SEQ ID NO: 33046 - RNA, 22 nt, Artificial Sequence
  RPE65 RNA guide
gguaaggcagaguauaucagca

SEQ ID NO: 33047 - RNA, 22 nt, Artificial Sequence
  RPE65 RNA guide
ggugagucaagucagcagacau

SEQ ID NO: 33048 - RNA, 22 nt, Artificial Sequence
  RPE65 RNA guide
gguggagagucccaauccucuc

SEQ ID NO: 33049 - RNA, 22 nt, Artificial Sequence
  RPE65 RNA guide
ggugugaucuccuagugaaggu

SEQ ID NO: 33050 - RNA, 22 nt, Artificial Sequence
  RPE65 RNA guide
gguguuuggggaaaucuauuag

SEQ ID NO: 33051 - RNA, 22 nt, Artificial Sequence
  RPE65 RNA guide
gguuggaaggagugagggagaa

SEQ ID NO: 33052 - RNA, 22 nt, Artificial Sequence
  RPE65 RNA guide
guaaggcagaguauaucagcag

SEQ ID NO: 33053 - RNA, 22 nt, Artificial Sequence
  RPE65 RNA guide
guauaucagcagccugauuggg

SEQ ID NO: 33054 - RNA, 22 nt, Artificial Sequence
  RPE65 RNA guide
gucaagucagcagacauuuucu

SEQ ID NO: 33055 - RNA, 22 nt, Artificial Sequence
  RPE65 RNA guide
gucagcagacauuuucuaagug

SEQ ID NO: 33056 - RNA, 22 nt, Artificial Sequence
  RPE65 RNA guide
guccagcgcgagggcuggaaau

SEQ ID NO: 33057 - RNA, 22 nt, Artificial Sequence
  RPE65 RNA guide
gucccaauccucucaagaugcu

SEQ ID NO: 33058 - RNA, 22 nt, Artificial Sequence
  RPE65 RNA guide
guccuugguaaggcagaguaua

SEQ ID NO: 33059 - RNA, 22 nt, Artificial Sequence
  RPE65 RNA guide
gucugcugacuugacucaccuu

SEQ ID NO: 33060 - RNA, 22 nt, Artificial Sequence
  RPE65 RNA guide
gugaaggugagucaagucagca

SEQ ID NO: 33061 - RNA, 22 nt, Artificial Sequence
  RPE65 RNA guide
gugagggagaagcaucuugaga

SEQ ID NO: 33062 - RNA, 22 nt, Artificial Sequence
  RPE65 RNA guide
gugagucaagucagcagacauu

SEQ ID NO: 33063 - RNA, 22 nt, Artificial Sequence
  RPE65 RNA guide
gugaucuccuagugaaggugag

SEQ ID NO: 33064 - RNA, 22 nt, Artificial Sequence
  RPE65 RNA guide
gugaugaaggggagacagaaca

SEQ ID NO: 33065 - RNA, 22 nt, Artificial Sequence
  RPE65 RNA guide
gugauuuucauuuccagcccuc

SEQ ID NO: 33066 - RNA, 22 nt, Artificial Sequence
  RPE65 RNA guide
gugcuguccagcgcgagggcug

SEQ ID NO: 33067 - RNA, 22 nt, Artificial Sequence
  RPE65 RNA guide
guggagagucccaauccucuca

SEQ ID NO: 33068 - RNA, 22 nt, Artificial Sequence
  RPE65 RNA guide
guggagaugccccagagugugg

SEQ ID NO: 33069 - RNA, 22 nt, Artificial Sequence
  RPE65 RNA guide
guggauaaaggguuggaaggag

SEQ ID NO: 33070 - RNA, 22 nt, Artificial Sequence
  RPE65 RNA guide
gugugaucuccuagugaaggug

SEQ ID NO: 33071 - RNA, 22 nt, Artificial Sequence
  RPE65 RNA guide
guguggauaaaggguuggaagg

SEQ ID NO: 33072 - RNA, 22 nt, Artificial Sequence
  RPE65 RNA guide
guguuuggggaaaucuauuagg

SEQ ID NO: 33073 - RNA, 22 nt, Artificial Sequence
  RPE65 RNA guide
guuggaaggagugagggagaag

SEQ ID NO: 33074 - RNA, 22 nt, Artificial Sequence
  RPE65 RNA guide
guuuggggaaaucuauuaggug

SEQ ID NO: 33075 - RNA, 22 nt, Artificial Sequence
  RPE65 RNA guide
uaaaaaugagauggcaaaaggc

SEQ ID NO: 33076 - RNA, 22 nt, Artificial Sequence
  RPE65 RNA guide
uaaagagccaggauuccuguuu

SEQ ID NO: 33077 - RNA, 22 nt, Artificial Sequence
  RPE65 RNA guide
uaaaggguuggaaggagugagg

SEQ ID NO: 33078 - RNA, 22 nt, Artificial Sequence
  RPE65 RNA guide
uaaaugaaaaaacaggaauccu

SEQ ID NO: 33079 - RNA, 22 nt, Artificial Sequence
  RPE65 RNA guide
uaagaagcaauguucugucucc

SEQ ID NO: 33080 - RNA, 22 nt, Artificial Sequence
  RPE65 RNA guide
uaaggcagaguauaucagcagc

SEQ ID NO: 33081 - RNA, 22 nt, Artificial Sequence
  RPE65 RNA guide
uaagugcuguccagcgcgaggg

SEQ ID NO: 33082 - RNA, 22 nt, Artificial Sequence
  RPE65 RNA guide
uaauagauuuccccaaacacca

SEQ ID NO: 33083 - RNA, 22 nt, Artificial Sequence
  RPE65 RNA guide
uaccaaggacaagccuagccca

SEQ ID NO: 33084 - RNA, 22 nt, Artificial Sequence
  RPE65 RNA guide
uacuccucacuccacuaaaaua

SEQ ID NO: 33085 - RNA, 22 nt, Artificial Sequence
  RPE65 RNA guide
uacucugccuuaccaaggacaa

SEQ ID NO: 33086 - RNA, 22 nt, Artificial Sequence
  RPE65 RNA guide
uagaaaaugucugcugacuuga

SEQ ID NO: 33087 - RNA, 22 nt, Artificial Sequence
  RPE65 RNA guide
uagagcuggcagugauuuucau

SEQ ID NO: 33088 - RNA, 22 nt, Artificial Sequence
  RPE65 RNA guide
uagauuuccccaaacaccaauc

SEQ ID NO: 33089 - RNA, 22 nt, Artificial Sequence
  RPE65 RNA guide
uagauuuuaaagagccaggauu

SEQ ID NO: 33090 - RNA, 22 nt, Artificial Sequence
  RPE65 RNA guide
uagcccaaggcagggauaagaa

SEQ ID NO: 33091 - RNA, 22 nt, Artificial Sequence
  RPE65 RNA guide
uagcucuagauuuuaaagagcc

SEQ ID NO: 33092 - RNA, 22 nt, Artificial Sequence
  RPE65 RNA guide
uaggcuuguccuugguaaggca

SEQ ID NO: 33093 - RNA, 22 nt, Artificial Sequence
  RPE65 RNA guide
uagguggagagucccaauccuc

SEQ ID NO: 33094 - RNA, 22 nt, Artificial Sequence
  RPE65 RNA guide
uagugaaggugagucaagucag

SEQ ID NO: 33095 - RNA, 22 nt, Artificial Sequence
  RPE65 RNA guide
uauacucugccuuaccaaggac

SEQ ID NO: 33096 - RNA, 22 nt, Artificial Sequence
  RPE65 RNA guide
uauaucagcagccugauugggc

SEQ ID NO: 33097 - RNA, 22 nt, Artificial Sequence
  RPE65 RNA guide
uauauuuuaguggagugaggag

SEQ ID NO: 33098 - RNA, 22 nt, Artificial Sequence
  RPE65 RNA guide
uaucagcagccugauugggcag

SEQ ID NO: 33099 - RNA, 22 nt, Artificial Sequence
  RPE65 RNA guide
uaucccugccuugggcuaggcu

SEQ ID NO: 33100 - RNA, 22 nt, Artificial Sequence
  RPE65 RNA guide
uaugaggaagaagcugcccaau

SEQ ID NO: 33101 - RNA, 22 nt, Artificial Sequence
  RPE65 RNA guide
uauuagguggagagucccaauc

SEQ ID NO: 33102 - RNA, 22 nt, Artificial Sequence
  RPE65 RNA guide
uauuuuaguggagugaggagua

SEQ ID NO: 33103 - RNA, 22 nt, Artificial Sequence
  RPE65 RNA guide
ucaagaugcuucucccucacuc

SEQ ID NO: 33104 - RNA, 22 nt, Artificial Sequence
  RPE65 RNA guide
ucaagucagcagacauuuucua

SEQ ID NO: 33105 - RNA, 22 nt, Artificial Sequence
  RPE65 RNA guide
ucaccuucacuaggagaucaca

SEQ ID NO: 33106 - RNA, 22 nt, Artificial Sequence
  RPE65 RNA guide
ucacuaggagaucacaccuugg

SEQ ID NO: 33107 - RNA, 22 nt, Artificial Sequence
  RPE65 RNA guide
ucacuccuuccaacccuuuauc

SEQ ID NO: 33108 - RNA, 22 nt, Artificial Sequence
  RPE65 RNA guide
ucacugccagcucuaugaggaa

SEQ ID NO: 33109 - RNA, 22 nt, Artificial Sequence
  RPE65 RNA guide
ucagcagacauuuucuaagugc

SEQ ID NO: 33110 - RNA, 22 nt, Artificial Sequence
  RPE65 RNA guide
ucagcagccugauugggcagcu

SEQ ID NO: 33111 - RNA, 22 nt, Artificial Sequence
  RPE65 RNA guide
ucaggcugcugauauacucugc

SEQ ID NO: 33112 - RNA, 22 nt, Artificial Sequence
  RPE65 RNA guide
ucauagagcuggcagugauuuu

SEQ ID NO: 33113 - RNA, 22 nt, Artificial Sequence
  RPE65 RNA guide
ucauuuccagcccucgcgcugg

SEQ ID NO: 33114 - RNA, 22 nt, Artificial Sequence
  RPE65 RNA guide
uccaacccuuuauccacacucu

SEQ ID NO: 33115 - RNA, 22 nt, Artificial Sequence
  RPE65 RNA guide
uccaccuaauagauuuccccaa

SEQ ID NO: 33116 - RNA, 22 nt, Artificial Sequence
  RPE65 RNA guide
uccagcccucgcgcuggacagc

SEQ ID NO: 33117 - RNA, 22 nt, Artificial Sequence
  RPE65 RNA guide
uccagcgcgagggcuggaaaug

SEQ ID NO: 33118 - RNA, 22 nt, Artificial Sequence
  RPE65 RNA guide
uccauuugccuuuugccaucuc

SEQ ID NO: 33119 - RNA, 22 nt, Artificial Sequence
  RPE65 RNA guide
ucccaaggugugaucuccuagu

SEQ ID NO: 33120 - RNA, 22 nt, Artificial Sequence
  RPE65 RNA guide
ucccaauccucucaagaugcuu

SEQ ID NO: 33121 - RNA, 22 nt, Artificial Sequence
  RPE65 RNA guide
uccccaaacaccaauccauuug

SEQ ID NO: 33122 - RNA, 22 nt, Artificial Sequence
  RPE65 RNA guide
ucccucacuccuuccaacccuu

SEQ ID NO: 33123 - RNA, 22 nt, Artificial Sequence
  RPE65 RNA guide
ucccugccuugggcuaggcuug

SEQ ID NO: 33124 - RNA, 22 nt, Artificial Sequence
  RPE65 RNA guide
uccuagugaaggugagucaagu

SEQ ID NO: 33125 - RNA, 22 nt, Artificial Sequence
  RPE65 RNA guide
uccucacuccacuaaaauauau

SEQ ID NO: 33126 - RNA, 22 nt, Artificial Sequence
  RPE65 RNA guide
uccucauagagcuggcagugau

SEQ ID NO: 33127 - RNA, 22 nt, Artificial Sequence
  RPE65 RNA guide
uccucucaagaugcuucucccu

SEQ ID NO: 33128 - RNA, 22 nt, Artificial Sequence
  RPE65 RNA guide
uccuggcucuuuaaaaucuaga

SEQ ID NO: 33129 - RNA, 22 nt, Artificial Sequence
  RPE65 RNA guide
uccuuccaacccuuuauccaca

SEQ ID NO: 33130 - RNA, 22 nt, Artificial Sequence
  RPE65 RNA guide
uccuugguaaggcagaguauau

SEQ ID NO: 33131 - RNA, 22 nt, Artificial Sequence
  RPE65 RNA guide
ucgcgcuggacagcacuuagaa

SEQ ID NO: 33132 - RNA, 22 nt, Artificial Sequence
  RPE65 RNA guide
ucuaagugcuguccagcgcgag

SEQ ID NO: 33133 - RNA, 22 nt, Artificial Sequence
  RPE65 RNA guide
ucuacuccucacuccacuaaaa

SEQ ID NO: 33134 - RNA, 22 nt, Artificial Sequence
  RPE65 RNA guide
ucuagauuuuaaagagccagga

SEQ ID NO: 33135 - RNA, 22 nt, Artificial Sequence
  RPE65 RNA guide
ucuaugaggaagaagcugccca

SEQ ID NO: 33136 - RNA, 22 nt, Artificial Sequence
  RPE65 RNA guide
ucuauuagguggagagucccaa

SEQ ID NO: 33137 - RNA, 22 nt, Artificial Sequence
  RPE65 RNA guide
ucucaagaugcuucucccucac

SEQ ID NO: 33138 - RNA, 22 nt, Artificial Sequence
  RPE65 RNA guide
ucuccaccuaauagauuucccc

SEQ ID NO: 33139 - RNA, 22 nt, Artificial Sequence
  RPE65 RNA guide
ucucccucacuccuuccaaccc

SEQ ID NO: 33140 - RNA, 22 nt, Artificial Sequence
  RPE65 RNA guide
ucuccuagugaaggugagucaa

SEQ ID NO: 33141 - RNA, 22 nt, Artificial Sequence
  RPE65 RNA guide
ucugccuuaccaaggacaagcc

SEQ ID NO: 33142 - RNA, 22 nt, Artificial Sequence
  RPE65 RNA guide
ucugcugacuugacucaccuuc

SEQ ID NO: 33143 - RNA, 22 nt, Artificial Sequence
  RPE65 RNA guide
ucuuaaaaaugagauggcaaaa

SEQ ID NO: 33144 - RNA, 22 nt, Artificial Sequence
  RPE65 RNA guide
ucuuaucccugccuugggcuag

SEQ ID NO: 33145 - RNA, 22 nt, Artificial Sequence
  RPE65 RNA guide
ucuuccucauagagcuggcagu

SEQ ID NO: 33146 - RNA, 22 nt, Artificial Sequence
  RPE65 RNA guide
ucuucuuaaaaaugagauggca

SEQ ID NO: 33147 - RNA, 22 nt, Artificial Sequence
  RPE65 RNA guide
ucuugagaggauugggacucuc

SEQ ID NO: 33148 - RNA, 22 nt, Artificial Sequence
  RPE65 RNA guide
ucuugauauauuuuaguggagu

SEQ ID NO: 33149 - RNA, 22 nt, Artificial Sequence
  RPE65 RNA guide
ugaaaaaacaggaauccuggcu

SEQ ID NO: 33150 - RNA, 22 nt, Artificial Sequence
  RPE65 RNA guide
ugaaaaucacugccagcucuau

SEQ ID NO: 33151 - RNA, 22 nt, Artificial Sequence
  RPE65 RNA guide
ugaaggggagacagaacauugc

SEQ ID NO: 33152 - RNA, 22 nt, Artificial Sequence
  RPE65 RNA guide
ugaaggugagucaagucagcag

SEQ ID NO: 33153 - RNA, 22 nt, Artificial Sequence
  RPE65 RNA guide
ugacucaccuucacuaggagau

SEQ ID NO: 33154 - RNA, 22 nt, Artificial Sequence
  RPE65 RNA guide
ugacuugacucaccuucacuag

SEQ ID NO: 33155 - RNA, 22 nt, Artificial Sequence
  RPE65 RNA guide
ugagaggauugggacucuccac

SEQ ID NO: 33156 - RNA, 22 nt, Artificial Sequence
  RPE65 RNA guide
ugagauggcaaaaggcaaaugg

SEQ ID NO: 33157 - RNA, 22 nt, Artificial Sequence
  RPE65 RNA guide
ugaggaagaagcugcccaauca

SEQ ID NO: 33158 - RNA, 22 nt, Artificial Sequence
  RPE65 RNA guide
ugagggagaagcaucuugagag

SEQ ID NO: 33159 - RNA, 22 nt, Artificial Sequence
  RPE65 RNA guide
ugagucaagucagcagacauuu

SEQ ID NO: 33160 - RNA, 22 nt, Artificial Sequence
  RPE65 RNA guide
ugauauacucugccuuaccaag

SEQ ID NO: 33161 - RNA, 22 nt, Artificial Sequence
  RPE65 RNA guide
ugauauauuuuaguggagugag

SEQ ID NO: 33162 - RNA, 22 nt, Artificial Sequence
  RPE65 RNA guide
ugaucuccuagugaaggugagu

SEQ ID NO: 33163 - RNA, 22 nt, Artificial Sequence
  RPE65 RNA guide
ugaugaaggggagacagaacau

SEQ ID NO: 33164 - RNA, 22 nt, Artificial Sequence
  RPE65 RNA guide
ugauugggcagcuucuuccuca

SEQ ID NO: 33165 - RNA, 22 nt, Artificial Sequence
  RPE65 RNA guide
ugauuuucauuuccagcccucg

SEQ ID NO: 33166 - RNA, 22 nt, Artificial Sequence
  RPE65 RNA guide
ugccagcucuaugaggaagaag

SEQ ID NO: 33167 - RNA, 22 nt, Artificial Sequence
  RPE65 RNA guide
ugcccaaucaggcugcugauau

SEQ ID NO: 33168 - RNA, 22 nt, Artificial Sequence
  RPE65 RNA guide
ugccccagaguguggauaaagg

SEQ ID NO: 33169 - RNA, 22 nt, Artificial Sequence
  RPE65 RNA guide
ugccuuaccaaggacaagccua

SEQ ID NO: 33170 - RNA, 22 nt, Artificial Sequence
  RPE65 RNA guide
ugccuugggcuaggcuuguccu

SEQ ID NO: 33171 - RNA, 22 nt, Artificial Sequence
  RPE65 RNA guide
ugccuuuugccaucucauuuuu

SEQ ID NO: 33172 - RNA, 22 nt, Artificial Sequence
  RPE65 RNA guide
ugcugacuugacucaccuucac

SEQ ID NO: 33173 - RNA, 22 nt, Artificial Sequence
  RPE65 RNA guide
ugcugauauacucugccuuacc

SEQ ID NO: 33174 - RNA, 22 nt, Artificial Sequence
  RPE65 RNA guide
ugcuguccagcgcgagggcugg

SEQ ID NO: 33175 - RNA, 22 nt, Artificial Sequence
  RPE65 RNA guide
ugcuucucccucacuccuucca

SEQ ID NO: 33176 - RNA, 22 nt, Artificial Sequence
  RPE65 RNA guide
ugcuucuuaucccugccuuggg

SEQ ID NO: 33177 - RNA, 22 nt, Artificial Sequence
  RPE65 RNA guide
uggaaaugaaaaucacugccag

SEQ ID NO: 33178 - RNA, 22 nt, Artificial Sequence
  RPE65 RNA guide
uggaaggagugagggagaagca

SEQ ID NO: 33179 - RNA, 22 nt, Artificial Sequence
  RPE65 RNA guide
uggacagcacuuagaaaauguc

SEQ ID NO: 33180 - RNA, 22 nt, Artificial Sequence
  RPE65 RNA guide
uggagagucccaauccucucaa

SEQ ID NO: 33181 - RNA, 22 nt, Artificial Sequence
  RPE65 RNA guide
uggagaugccccagagugugga

SEQ ID NO: 33182 - RNA, 22 nt, Artificial Sequence
  RPE65 RNA guide
uggauaaaggguuggaaggagu

SEQ ID NO: 33183 - RNA, 22 nt, Artificial Sequence
  RPE65 RNA guide
uggauugguguuuggggaaauc

SEQ ID NO: 33184 - RNA, 22 nt, Artificial Sequence
  RPE65 RNA guide
uggcaaaaggcaaauggauugg

SEQ ID NO: 33185 - RNA, 22 nt, Artificial Sequence
  RPE65 RNA guide
uggcagugauuuucauuuccag

SEQ ID NO: 33186 - RNA, 22 nt, Artificial Sequence
  RPE65 RNA guide
ugggacucuccaccuaauagau

SEQ ID NO: 33187 - RNA, 22 nt, Artificial Sequence
  RPE65 RNA guide
ugggcagcuucuuccucauaga

SEQ ID NO: 33188 - RNA, 22 nt, Artificial Sequence
  RPE65 RNA guide
ugggcuaggcuuguccuuggua

SEQ ID NO: 33189 - RNA, 22 nt, Artificial Sequence
  RPE65 RNA guide
uggggaaaucuauuagguggag

SEQ ID NO: 33190 - RNA, 22 nt, Artificial Sequence
  RPE65 RNA guide
ugguaaggcagaguauaucagc

SEQ ID NO: 33191 - RNA, 22 nt, Artificial Sequence
  RPE65 RNA guide
ugguguuuggggaaaucuauua

SEQ ID NO: 33192 - RNA, 22 nt, Artificial Sequence
  RPE65 RNA guide
uguccagcgcgagggcuggaaa

SEQ ID NO: 33193 - RNA, 22 nt, Artificial Sequence
  RPE65 RNA guide
uguccuugguaaggcagaguau

SEQ ID NO: 33194 - RNA, 22 nt, Artificial Sequence
  RPE65 RNA guide
ugucugcugacuugacucaccu

SEQ ID NO: 33195 - RNA, 22 nt, Artificial Sequence
  RPE65 RNA guide
ugugaucuccuagugaagguga

SEQ ID NO: 33196 - RNA, 22 nt, Artificial Sequence
  RPE65 RNA guide
ugugaugaaggggagacagaac

SEQ ID NO: 33197 - RNA, 22 nt, Artificial Sequence
  RPE65 RNA guide
uguggagaugccccagagugug

SEQ ID NO: 33198 - RNA, 22 nt, Artificial Sequence
  RPE65 RNA guide
uguggauaaaggguuggaagga

SEQ ID NO: 33199 - RNA, 22 nt, Artificial Sequence
  RPE65 RNA guide
uguuuggggaaaucuauuaggu

SEQ ID NO: 33200 - RNA, 22 nt, Artificial Sequence
  RPE65 RNA guide
uuaaaaaugagauggcaaaagg

SEQ ID NO: 33201 - RNA, 22 nt, Artificial Sequence
  RPE65 RNA guide
uuaaagagccaggauuccuguu

SEQ ID NO: 33202 - RNA, 22 nt, Artificial Sequence
  RPE65 RNA guide
uuaaaugaaaaaacaggaaucc

SEQ ID NO: 33203 - RNA, 22 nt, Artificial Sequence
  RPE65 RNA guide
uuaccaaggacaagccuagccc

SEQ ID NO: 33204 - RNA, 22 nt, Artificial Sequence
  RPE65 RNA guide
uuagaaaaugucugcugacuug

SEQ ID NO: 33205 - RNA, 22 nt, Artificial Sequence
  RPE65 RNA guide
uuagguggagagucccaauccu

SEQ ID NO: 33206 - RNA, 22 nt, Artificial Sequence
  RPE65 RNA guide
uuauccacacucuggggcaucu

SEQ ID NO: 33207 - RNA, 22 nt, Artificial Sequence
  RPE65 RNA guide
uuaucccugccuugggcuaggc

SEQ ID NO: 33208 - RNA, 22 nt, Artificial Sequence
  RPE65 RNA guide
uuauucucacucuuaauccaua

SEQ ID NO: 33209 - RNA, 22 nt, Artificial Sequence
  RPE65 RNA guide
uucacuaggagaucacaccuug

SEQ ID NO: 33210 - RNA, 22 nt, Artificial Sequence
  RPE65 RNA guide
uucauuuccagcccucgcgcug

SEQ ID NO: 33211 - RNA, 22 nt, Artificial Sequence
  RPE65 RNA guide
uuccaacccuuuauccacacuc

SEQ ID NO: 33212 - RNA, 22 nt, Artificial Sequence
  RPE65 RNA guide
uuccagcccucgcgcuggacag

SEQ ID NO: 33213 - RNA, 22 nt, Artificial Sequence
  RPE65 RNA guide
uucccaaggugugaucuccuag

SEQ ID NO: 33214 - RNA, 22 nt, Artificial Sequence
  RPE65 RNA guide
uuccccaaacaccaauccauuu

SEQ ID NO: 33215 - RNA, 22 nt, Artificial Sequence
  RPE65 RNA guide
uuccucauagagcuggcaguga

SEQ ID NO: 33216 - RNA, 22 nt, Artificial Sequence
  RPE65 RNA guide
uucuaagugcuguccagcgcga

SEQ ID NO: 33217 - RNA, 22 nt, Artificial Sequence
  RPE65 RNA guide
uucuacuccucacuccacuaaa

SEQ ID NO: 33218 - RNA, 22 nt, Artificial Sequence
  RPE65 RNA guide
uucucccucacuccuuccaacc

SEQ ID NO: 33219 - RNA, 22 nt, Artificial Sequence
  RPE65 RNA guide
uucuuaaaaaugagauggcaaa

SEQ ID NO: 33220 - RNA, 22 nt, Artificial Sequence
  RPE65 RNA guide
uucuuaucccugccuugggcua

SEQ ID NO: 33221 - RNA, 22 nt, Artificial Sequence
  RPE65 RNA guide
uucuuccucauagagcuggcag

SEQ ID NO: 33222 - RNA, 22 nt, Artificial Sequence
  RPE65 RNA guide
uucuugauauauuuuaguggag

SEQ ID NO: 33223 - RNA, 22 nt, Artificial Sequence
  RPE65 RNA guide
uugacucaccuucacuaggaga

SEQ ID NO: 33224 - RNA, 22 nt, Artificial Sequence
  RPE65 RNA guide
uugagaggauugggacucucca

SEQ ID NO: 33225 - RNA, 22 nt, Artificial Sequence
  RPE65 RNA guide
uugauauauuuuaguggaguga

SEQ ID NO: 33226 - RNA, 22 nt, Artificial Sequence
  RPE65 RNA guide
uugccuuuugccaucucauuuu

SEQ ID NO: 33227 - RNA, 22 nt, Artificial Sequence
  RPE65 RNA guide
uugcuucuuaucccugccuugg

SEQ ID NO: 33228 - RNA, 22 nt, Artificial Sequence
  RPE65 RNA guide
uuggaaggagugagggagaagc

SEQ ID NO: 33229 - RNA, 22 nt, Artificial Sequence
  RPE65 RNA guide
uugggacucuccaccuaauaga

SEQ ID NO: 33230 - RNA, 22 nt, Artificial Sequence
  RPE65 RNA guide
uugggcagcuucuuccucauag

SEQ ID NO: 33231 - RNA, 22 nt, Artificial Sequence
  RPE65 RNA guide
uugggcuaggcuuguccuuggu

SEQ ID NO: 33232 - RNA, 22 nt, Artificial Sequence
  RPE65 RNA guide
uuggggaaaucuauuaggugga

SEQ ID NO: 33233 - RNA, 22 nt, Artificial Sequence
  RPE65 RNA guide
uugguaaggcagaguauaucag

SEQ ID NO: 33234 - RNA, 22 nt, Artificial Sequence
  RPE65 RNA guide
uugguguuuggggaaaucuauu

SEQ ID NO: 33235 - RNA, 22 nt, Artificial Sequence
  RPE65 RNA guide
uuguccuugguaaggcagagua

SEQ ID NO: 33236 - RNA, 22 nt, Artificial Sequence
  RPE65 RNA guide
uuuaaagagccaggauuccugu

SEQ ID NO: 33237 - RNA, 22 nt, Artificial Sequence
  RPE65 RNA guide
uuuaaaugaaaaaacaggaauc

SEQ ID NO: 33238 - RNA, 22 nt, Artificial Sequence
  RPE65 RNA guide
uuuauccacacucuggggcauc

SEQ ID NO: 33239 - RNA, 22 nt, Artificial Sequence
  RPE65 RNA guide
uuucauuuccagcccucgcgcu

SEQ ID NO: 33240 - RNA, 22 nt, Artificial Sequence
  RPE65 RNA guide
uuuccagcccucgcgcuggaca

SEQ ID NO: 33241 - RNA, 22 nt, Artificial Sequence
  RPE65 RNA guide
uuucccaaggugugaucuccua

SEQ ID NO: 33242 - RNA, 22 nt, Artificial Sequence
  RPE65 RNA guide
uuuccccaaacaccaauccauu

SEQ ID NO: 33243 - RNA, 22 nt, Artificial Sequence
  RPE65 RNA guide
uuucuaagugcuguccagcgcg

SEQ ID NO: 33244 - RNA, 22 nt, Artificial Sequence
  RPE65 RNA guide
uuugccuuuugccaucucauuu

SEQ ID NO: 33245 - RNA, 22 nt, Artificial Sequence
  RPE65 RNA guide
uuuggggaaaucuauuaggugg

SEQ ID NO: 33246 - RNA, 22 nt, Artificial Sequence
  RPE65 RNA guide
uuuuaaagagccaggauuccug

SEQ ID NO: 33247 - RNA, 22 nt, Artificial Sequence
  RPE65 RNA guide
uuuucauuuccagcccucgcgc

SEQ ID NO: 33248 - RNA, 22 nt, Artificial Sequence
  RPE65 RNA guide
uuuucuaagugcuguccagcgc

SEQ ID NO: 33249 - RNA, 20 nt, Artificial Sequence
  RPE65 RNA guide
aaaaaggaaucaagauggcc

SEQ ID NO: 33250 - RNA, 20 nt, Artificial Sequence
  RPE65 RNA guide
aaaaccaagaauuggagguc

SEQ ID NO: 33251 - RNA, 20 nt, Artificial Sequence
  RPE65 RNA guide
aaaacucacaugggaggagg

SEQ ID NO: 33252 - RNA, 20 nt, Artificial Sequence
  RPE65 RNA guide
aaaagaaaaaggaaucaaga

SEQ ID NO: 33253 - RNA, 20 nt, Artificial Sequence
  RPE65 RNA guide
aaaaggaaucaagauggcca

SEQ ID NO: 33254 - RNA, 20 nt, Artificial Sequence
  RPE65 RNA guide
aaaauuggaaaggccacugg

SEQ ID NO: 33255 - RNA, 20 nt, Artificial Sequence
  RPE65 RNA guide
aaaccaagaauuggagguca

SEQ ID NO: 33256 - RNA, 20 nt, Artificial Sequence
  RPE65 RNA guide
aaaccauuggccaucuugau

SEQ ID NO: 33257 - RNA, 20 nt, Artificial Sequence
  RPE65 RNA guide
aaacccuguauucaacagac

SEQ ID NO: 33258 - RNA, 20 nt, Artificial Sequence
  RPE65 RNA guide
aaacucacaugggaggagga

SEQ ID NO: 33259 - RNA, 20 nt, Artificial Sequence
  RPE65 RNA guide
aaagaaaaaggaaucaagau

SEQ ID NO: 33260 - RNA, 20 nt, Artificial Sequence
  RPE65 RNA guide
aaagcagcacuccaugccac

SEQ ID NO: 33261 - RNA, 20 nt, Artificial Sequence
  RPE65 RNA guide
aaagccacucauguuggacc

SEQ ID NO: 33262 - RNA, 20 nt, Artificial Sequence
  RPE65 RNA guide
aaagcccuaggcuuuagcuu

SEQ ID NO: 33263 - RNA, 20 nt, Artificial Sequence
  RPE65 RNA guide
aaagccuagggcuuuggggu

SEQ ID NO: 33264 - RNA, 20 nt, Artificial Sequence
  RPE65 RNA guide
aaaggaaucaagauggccaa

SEQ ID NO: 33265 - RNA, 20 nt, Artificial Sequence
  RPE65 RNA guide
aaaggagaagcuaaagccua

SEQ ID NO: 33266 - RNA, 20 nt, Artificial Sequence
  RPE65 RNA guide
aaaggccacugggaaagggg

SEQ ID NO: 33267 - RNA, 20 nt, Artificial Sequence
  RPE65 RNA guide
aaaguagggccuagcuuggc

SEQ ID NO: 33268 - RNA, 20 nt, Artificial Sequence
  RPE65 RNA guide
aaaguggguauauagguugc

SEQ ID NO: 33269 - RNA, 20 nt, Artificial Sequence
  RPE65 RNA guide
aaauuggaaaggccacuggg

SEQ ID NO: 33270 - RNA, 20 nt, Artificial Sequence
  RPE65 RNA guide
aacagacaugacuugccuag

SEQ ID NO: 33271 - RNA, 20 nt, Artificial Sequence
  RPE65 RNA guide
aacaucuugccaagguuacc

SEQ ID NO: 33272 - RNA, 20 nt, Artificial Sequence
  RPE65 RNA guide
aacaugaguggcuuuaaacc

SEQ ID NO: 33273 - RNA, 20 nt, Artificial Sequence
  RPE65 RNA guide
aaccaagaauuggaggucaa

SEQ ID NO: 33274 - RNA, 20 nt, Artificial Sequence
  RPE65 RNA guide
aaccauuggccaucuugauu

SEQ ID NO: 33275 - RNA, 20 nt, Artificial Sequence
  RPE65 RNA guide
aacccuguauucaacagaca

SEQ ID NO: 33276 - RNA, 20 nt, Artificial Sequence
  RPE65 RNA guide
aaccuauauacccacuuucu

SEQ ID NO: 33277 - RNA, 20 nt, Artificial Sequence
  RPE65 RNA guide
aaccuuggcaagauguugac

SEQ ID NO: 33278 - RNA, 20 nt, Artificial Sequence
  RPE65 RNA guide
aacucacaugggaggaggag

SEQ ID NO: 33279 - RNA, 20 nt, Artificial Sequence
  RPE65 RNA guide
aacucaggaggcaaccuaua

SEQ ID NO: 33280 - RNA, 20 nt, Artificial Sequence
  RPE65 RNA guide
aagaaaaaggaaucaagaug

SEQ ID NO: 33281 - RNA, 20 nt, Artificial Sequence
  RPE65 RNA guide
aagaaaguggguauauaggu

SEQ ID NO: 33282 - RNA, 20 nt, Artificial Sequence
  RPE65 RNA guide
aagaauuggaggucaacauc

SEQ ID NO: 33283 - RNA, 20 nt, Artificial Sequence
  RPE65 RNA guide
aagauguugaccuccaauuc

SEQ ID NO: 33284 - RNA, 20 nt, Artificial Sequence
  RPE65 RNA guide
aagcagcacuccaugccacu

SEQ ID NO: 33285 - RNA, 20 nt, Artificial Sequence
  RPE65 RNA guide
aagcauuaaaugagagcgca

SEQ ID NO: 33286 - RNA, 20 nt, Artificial Sequence
  RPE65 RNA guide
aagccacucauguuggaccc

SEQ ID NO: 33287 - RNA, 20 nt, Artificial Sequence
  RPE65 RNA guide
aagcccuaggcuuuagcuuc

SEQ ID NO: 33288 - RNA, 20 nt, Artificial Sequence
  RPE65 RNA guide
aagccuagggcuuugggguc

SEQ ID NO: 33289 - RNA, 20 nt, Artificial Sequence
  RPE65 RNA guide
aagcuaaagccuagggcuuu

SEQ ID NO: 33290 - RNA, 20 nt, Artificial Sequence
  RPE65 RNA guide
aagcuaggcccuacuuugag

SEQ ID NO: 33291 - RNA, 20 nt, Artificial Sequence
  RPE65 RNA guide
aaggaaucaagauggccaau

SEQ ID NO: 33292 - RNA, 20 nt, Artificial Sequence
  RPE65 RNA guide
aaggagaagcuaaagccuag

SEQ ID NO: 33293 - RNA, 20 nt, Artificial Sequence
  RPE65 RNA guide
aaggccacugggaaaggggu

SEQ ID NO: 33294 - RNA, 20 nt, Artificial Sequence
  RPE65 RNA guide
aagguagauucuauuauuuc

SEQ ID NO: 33295 - RNA, 20 nt, Artificial Sequence
  RPE65 RNA guide
aagguuacccuccuaggcaa

SEQ ID NO: 33296 - RNA, 20 nt, Artificial Sequence
  RPE65 RNA guide
aaguagggccuagcuuggcu

SEQ ID NO: 33297 - RNA, 20 nt, Artificial Sequence
  RPE65 RNA guide
aagucaugucuguugaauac

SEQ ID NO: 33298 - RNA, 20 nt, Artificial Sequence
  RPE65 RNA guide
aaguggguauauagguugcc

SEQ ID NO: 33299 - RNA, 20 nt, Artificial Sequence
  RPE65 RNA guide
aauaaaggagaagcuaaagc

SEQ ID NO: 33300 - RNA, 20 nt, Artificial Sequence
  RPE65 RNA guide
aauacaggguuuaaagccac

SEQ ID NO: 33301 - RNA, 20 nt, Artificial Sequence
  RPE65 RNA guide
aaucaagauggccaaugguu

SEQ ID NO: 33302 - RNA, 20 nt, Artificial Sequence
  RPE65 RNA guide
aauguaccugggccagugug

SEQ ID NO: 33303 - RNA, 20 nt, Artificial Sequence
  RPE65 RNA guide
aauguucccucguauccaug

SEQ ID NO: 33304 - RNA, 20 nt, Artificial Sequence
  RPE65 RNA guide
aauuggaaaggccacuggga

SEQ ID NO: 33305 - RNA, 20 nt, Artificial Sequence
  RPE65 RNA guide
aauuggaggucaacaucuug

SEQ ID NO: 33306 - RNA, 20 nt, Artificial Sequence
  RPE65 RNA guide
acaagcauuaaaugagagcg

SEQ ID NO: 33307 - RNA, 20 nt, Artificial Sequence
  RPE65 RNA guide
acaauguaccugggccagug

SEQ ID NO: 33308 - RNA, 20 nt, Artificial Sequence
  RPE65 RNA guide
acacacuggcccagguacau

SEQ ID NO: 33309 - RNA, 20 nt, Artificial Sequence
  RPE65 RNA guide
acacugcgcucucauuuaau

SEQ ID NO: 33310 - RNA, 20 nt, Artificial Sequence
  RPE65 RNA guide
acacuggcccagguacauug

SEQ ID NO: 33311 - RNA, 20 nt, Artificial Sequence
  RPE65 RNA guide
acagacaugacuugccuagg

SEQ ID NO: 33312 - RNA, 20 nt, Artificial Sequence
  RPE65 RNA guide
acaggguuuaaagccacuca

SEQ ID NO: 33313 - RNA, 20 nt, Artificial Sequence
  RPE65 RNA guide
acaucuugccaagguuaccc

SEQ ID NO: 33314 - RNA, 20 nt, Artificial Sequence
  RPE65 RNA guide
acaugacuugccuaggaggg

SEQ ID NO: 33315 - RNA, 20 nt, Artificial Sequence
  RPE65 RNA guide
acaugaguggcuuuaaaccc

SEQ ID NO: 33316 - RNA, 20 nt, Artificial Sequence
  RPE65 RNA guide
acaugggaggaggagccaag

SEQ ID NO: 33317 - RNA, 20 nt, Artificial Sequence
  RPE65 RNA guide
acauugugagaagaaagugg

SEQ ID NO: 33318 - RNA, 20 nt, Artificial Sequence
  RPE65 RNA guide
accaagaauuggaggucaac

SEQ ID NO: 33319 - RNA, 20 nt, Artificial Sequence
  RPE65 RNA guide
accauuggccaucuugauuc

SEQ ID NO: 33320 - RNA, 20 nt, Artificial Sequence
  RPE65 RNA guide
acccacuuucuucucacaau

SEQ ID NO: 33321 - RNA, 20 nt, Artificial Sequence
  RPE65 RNA guide
accccaaagcccuaggcuuu

SEQ ID NO: 33322 - RNA, 20 nt, Artificial Sequence
  RPE65 RNA guide
accccuuucccaguggccuu

SEQ ID NO: 33323 - RNA, 20 nt, Artificial Sequence
  RPE65 RNA guide
acccuccuaggcaagucaug

SEQ ID NO: 33324 - RNA, 20 nt, Artificial Sequence
  RPE65 RNA guide
acccuguauucaacagacau

SEQ ID NO: 33325 - RNA, 20 nt, Artificial Sequence
  RPE65 RNA guide
accuauauacccacuuucuu

SEQ ID NO: 33326 - RNA, 20 nt, Artificial Sequence
  RPE65 RNA guide
accucugaacucaggaggca

SEQ ID NO: 33327 - RNA, 20 nt, Artificial Sequence
  RPE65 RNA guide
accugggccagugugucugc

SEQ ID NO: 33328 - RNA, 20 nt, Artificial Sequence
  RPE65 RNA guide
accuuggcaagauguugacc

SEQ ID NO: 33329 - RNA, 20 nt, Artificial Sequence
  RPE65 RNA guide
acgagggaacauuaucaugg

SEQ ID NO: 33330 - RNA, 20 nt, Artificial Sequence
  RPE65 RNA guide
acucacaugggaggaggagc

SEQ ID NO: 33331 - RNA, 20 nt, Artificial Sequence
  RPE65 RNA guide
acucaggaggcaaccuauau

SEQ ID NO: 33332 - RNA, 20 nt, Artificial Sequence
  RPE65 RNA guide
acucauguuggaccccaaag

SEQ ID NO: 33333 - RNA, 20 nt, Artificial Sequence
  RPE65 RNA guide
acuccaugccacuccuccuc

SEQ ID NO: 33334 - RNA, 20 nt, Artificial Sequence
  RPE65 RNA guide
acuccuccuccucaaaguag

SEQ ID NO: 33335 - RNA, 20 nt, Artificial Sequence
  RPE65 RNA guide
acugcgcucucauuuaaugc

SEQ ID NO: 33336 - RNA, 20 nt, Artificial Sequence
  RPE65 RNA guide
acuggcccagguacauugug

SEQ ID NO: 33337 - RNA, 20 nt, Artificial Sequence
  RPE65 RNA guide
acuugccuaggaggguaacc

SEQ ID NO: 33338 - RNA, 20 nt, Artificial Sequence
  RPE65 RNA guide
acuuucuucucacaauguac

SEQ ID NO: 33339 - RNA, 20 nt, Artificial Sequence
  RPE65 RNA guide
acuuugaggaggaggagugg

SEQ ID NO: 33340 - RNA, 20 nt, Artificial Sequence
  RPE65 RNA guide
agaaaaaggaaucaagaugg

SEQ ID NO: 33341 - RNA, 20 nt, Artificial Sequence
  RPE65 RNA guide
agaaaguggguauauagguu

SEQ ID NO: 33342 - RNA, 20 nt, Artificial Sequence
  RPE65 RNA guide
agaagaaaguggguauauag

SEQ ID NO: 33343 - RNA, 20 nt, Artificial Sequence
  RPE65 RNA guide
agaagcuaaagccuagggcu

SEQ ID NO: 33344 - RNA, 20 nt, Artificial Sequence
  RPE65 RNA guide
agaauuggaggucaacaucu

SEQ ID NO: 33345 - RNA, 20 nt, Artificial Sequence
  RPE65 RNA guide
agacacacuggcccagguac

SEQ ID NO: 33346 - RNA, 20 nt, Artificial Sequence
  RPE65 RNA guide
agacacugcgcucucauuua

SEQ ID NO: 33347 - RNA, 20 nt, Artificial Sequence
  RPE65 RNA guide
agacaugacuugccuaggag

SEQ ID NO: 33348 - RNA, 20 nt, Artificial Sequence
  RPE65 RNA guide
agaggugaaaacucacaugg

SEQ ID NO: 33349 - RNA, 20 nt, Artificial Sequence
  RPE65 RNA guide
agauguugaccuccaauucu

SEQ ID NO: 33350 - RNA, 20 nt, Artificial Sequence
  RPE65 RNA guide
agcacuccaugccacuccuc

SEQ ID NO: 33351 - RNA, 20 nt, Artificial Sequence
  RPE65 RNA guide
agcagcacuccaugccacuc

SEQ ID NO: 33352 - RNA, 20 nt, Artificial Sequence
  RPE65 RNA guide
agcauuaaaugagagcgcag

SEQ ID NO: 33353 - RNA, 20 nt, Artificial Sequence
  RPE65 RNA guide
agccaagcuaggcccuacuu

SEQ ID NO: 33354 - RNA, 20 nt, Artificial Sequence
  RPE65 RNA guide
agccacucauguuggacccc

SEQ ID NO: 33355 - RNA, 20 nt, Artificial Sequence
  RPE65 RNA guide
agcccuaggcuuuagcuucu

SEQ ID NO: 33356 - RNA, 20 nt, Artificial Sequence
  RPE65 RNA guide
agccuagggcuuuggggucc

SEQ ID NO: 33357 - RNA, 20 nt, Artificial Sequence
  RPE65 RNA guide
agcuaaagccuagggcuuug

SEQ ID NO: 33358 - RNA, 20 nt, Artificial Sequence
  RPE65 RNA guide
agcuaggcccuacuuugagg

SEQ ID NO: 33359 - RNA, 20 nt, Artificial Sequence
  RPE65 RNA guide
agcuucuccuuuauuccaug

SEQ ID NO: 33360 - RNA, 20 nt, Artificial Sequence
  RPE65 RNA guide
agcuuggcuccuccucccau

SEQ ID NO: 33361 - RNA, 20 nt, Artificial Sequence
  RPE65 RNA guide
aggaaucaagauggccaaug

SEQ ID NO: 33362 - RNA, 20 nt, Artificial Sequence
  RPE65 RNA guide
aggagaagcuaaagccuagg

SEQ ID NO: 33363 - RNA, 20 nt, Artificial Sequence
  RPE65 RNA guide
aggagccaagcuaggcccua

SEQ ID NO: 33364 - RNA, 20 nt, Artificial Sequence
  RPE65 RNA guide
aggaggagccaagcuaggcc

SEQ ID NO: 33365 - RNA, 20 nt, Artificial Sequence
  RPE65 RNA guide
aggaggaggaguggcaugga

SEQ ID NO: 33366 - RNA, 20 nt, Artificial Sequence
  RPE65 RNA guide
aggaggaguggcauggagug

SEQ ID NO: 33367 - RNA, 20 nt, Artificial Sequence
  RPE65 RNA guide
aggaggcaaccuauauaccc

SEQ ID NO: 33368 - RNA, 20 nt, Artificial Sequence
  RPE65 RNA guide
aggaggguaaccuuggcaag

SEQ ID NO: 33369 - RNA, 20 nt, Artificial Sequence
  RPE65 RNA guide
aggaguggcauggagugcug

SEQ ID NO: 33370 - RNA, 20 nt, Artificial Sequence
  RPE65 RNA guide
aggcaaccuauauacccacu

SEQ ID NO: 33371 - RNA, 20 nt, Artificial Sequence
  RPE65 RNA guide
aggcaagucaugucuguuga

SEQ ID NO: 33372 - RNA, 20 nt, Artificial Sequence
  RPE65 RNA guide
aggcccuacuuugaggagga

SEQ ID NO: 33373 - RNA, 20 nt, Artificial Sequence
  RPE65 RNA guide
aggcuuuagcuucuccuuua

SEQ ID NO: 33374 - RNA, 20 nt, Artificial Sequence
  RPE65 RNA guide
agggaacauuaucauggaau

SEQ ID NO: 33375 - RNA, 20 nt, Artificial Sequence
  RPE65 RNA guide
agggccuagcuuggcuccuc

SEQ ID NO: 33376 - RNA, 20 nt, Artificial Sequence
  RPE65 RNA guide
agggcuuugggguccaacau

SEQ ID NO: 33377 - RNA, 20 nt, Artificial Sequence
  RPE65 RNA guide
aggguaaccuuggcaagaug

SEQ ID NO: 33378 - RNA, 20 nt, Artificial Sequence
  RPE65 RNA guide
aggguuuaaagccacucaug

SEQ ID NO: 33379 - RNA, 20 nt, Artificial Sequence
  RPE65 RNA guide
agguacauugugagaagaaa

SEQ ID NO: 33380 - RNA, 20 nt, Artificial Sequence
  RPE65 RNA guide
agguagauucuauuauuucu

SEQ ID NO: 33381 - RNA, 20 nt, Artificial Sequence
  RPE65 RNA guide
aggucaacaucuugccaagg

SEQ ID NO: 33382 - RNA, 20 nt, Artificial Sequence
  RPE65 RNA guide
aggugaaaacucacauggga

SEQ ID NO: 33383 - RNA, 20 nt, Artificial Sequence
  RPE65 RNA guide
agguuacccuccuaggcaag

SEQ ID NO: 33384 - RNA, 20 nt, Artificial Sequence
  RPE65 RNA guide
agguugccuccugaguucag

SEQ ID NO: 33385 - RNA, 20 nt, Artificial Sequence
  RPE65 RNA guide
aguagggccuagcuuggcuc

SEQ ID NO: 33386 - RNA, 20 nt, Artificial Sequence
  RPE65 RNA guide
agucaugucuguugaauaca

SEQ ID NO: 33387 - RNA, 20 nt, Artificial Sequence
  RPE65 RNA guide
aguggcuuuaaacccuguau

SEQ ID NO: 33388 - RNA, 20 nt, Artificial Sequence
  RPE65 RNA guide
aguggguauauagguugccu

SEQ ID NO: 33389 - RNA, 20 nt, Artificial Sequence
  RPE65 RNA guide
agugugucugcauggauacg

SEQ ID NO: 33390 - RNA, 20 nt, Artificial Sequence
  RPE65 RNA guide
aguucagaggugaaaacuca

SEQ ID NO: 33391 - RNA, 20 nt, Artificial Sequence
  RPE65 RNA guide
aguuuucaccucugaacuca

SEQ ID NO: 33392 - RNA, 20 nt, Artificial Sequence
  RPE65 RNA guide
auaaaaccaagaauuggagg

SEQ ID NO: 33393 - RNA, 20 nt, Artificial Sequence
  RPE65 RNA guide
auaaaauuggaaaggccacu

SEQ ID NO: 33394 - RNA, 20 nt, Artificial Sequence
  RPE65 RNA guide
auaaaggagaagcuaaagcc

SEQ ID NO: 33395 - RNA, 20 nt, Artificial Sequence
  RPE65 RNA guide
auaauguucccucguaucca

SEQ ID NO: 33396 - RNA, 20 nt, Artificial Sequence
  RPE65 RNA guide
auacaggguuuaaagccacu

SEQ ID NO: 33397 - RNA, 20 nt, Artificial Sequence
  RPE65 RNA guide
auacccacuuucuucucaca

SEQ ID NO: 33398 - RNA, 20 nt, Artificial Sequence
  RPE65 RNA guide
auacgagggaacauuaucau

SEQ ID NO: 33399 - RNA, 20 nt, Artificial Sequence
  RPE65 RNA guide
auagguugccuccugaguuc

SEQ ID NO: 33400 - RNA, 20 nt, Artificial Sequence
  RPE65 RNA guide
auauacccacuuucuucuca

SEQ ID NO: 33401 - RNA, 20 nt, Artificial Sequence
  RPE65 RNA guide
auauagguugccuccugagu

SEQ ID NO: 33402 - RNA, 20 nt, Artificial Sequence
  RPE65 RNA guide
aucaagauggccaaugguuu

SEQ ID NO: 33403 - RNA, 20 nt, Artificial Sequence
  RPE65 RNA guide
aucauggaauaaaggagaag

SEQ ID NO: 33404 - RNA, 20 nt, Artificial Sequence
  RPE65 RNA guide
auccaugcagacacacuggc

SEQ ID NO: 33405 - RNA, 20 nt, Artificial Sequence
  RPE65 RNA guide
aucuugccaagguuacccuc

SEQ ID NO: 33406 - RNA, 20 nt, Artificial Sequence
  RPE65 RNA guide
augacuugccuaggagggua

SEQ ID NO: 33407 - RNA, 20 nt, Artificial Sequence
  RPE65 RNA guide
augaguggcuuuaaacccug

SEQ ID NO: 33408 - RNA, 20 nt, Artificial Sequence
  RPE65 RNA guide
augauaauguucccucguau

SEQ ID NO: 33409 - RNA, 20 nt, Artificial Sequence
  RPE65 RNA guide
augcagacacacuggcccag

SEQ ID NO: 33410 - RNA, 20 nt, Artificial Sequence
  RPE65 RNA guide
augccacuccuccuccucaa

SEQ ID NO: 33411 - RNA, 20 nt, Artificial Sequence
  RPE65 RNA guide
auggaauaaaggagaagcua

SEQ ID NO: 33412 - RNA, 20 nt, Artificial Sequence
  RPE65 RNA guide
auggauacgagggaacauua

SEQ ID NO: 33413 - RNA, 20 nt, Artificial Sequence
  RPE65 RNA guide
augggagaaauaauagaauc

SEQ ID NO: 33414 - RNA, 20 nt, Artificial Sequence
  RPE65 RNA guide
augggaggaggagccaagcu

SEQ ID NO: 33415 - RNA, 20 nt, Artificial Sequence
  RPE65 RNA guide
auguaccugggccagugugu

SEQ ID NO: 33416 - RNA, 20 nt, Artificial Sequence
  RPE65 RNA guide
augucuguugaauacagggu

SEQ ID NO: 33417 - RNA, 20 nt, Artificial Sequence
  RPE65 RNA guide
augugaguuuucaccucuga

SEQ ID NO: 33418 - RNA, 20 nt, Artificial Sequence
  RPE65 RNA guide
auguucccucguauccaugc

SEQ ID NO: 33419 - RNA, 20 nt, Artificial Sequence
  RPE65 RNA guide
auguugaccuccaauucuug

SEQ ID NO: 33420 - RNA, 20 nt, Artificial Sequence
  RPE65 RNA guide
auguuggaccccaaagcccu

SEQ ID NO: 33421 - RNA, 20 nt, Artificial Sequence
  RPE65 RNA guide
auuaaaccauuggccaucuu

SEQ ID NO: 33422 - RNA, 20 nt, Artificial Sequence
  RPE65 RNA guide
auuaaaugagagcgcagugu

SEQ ID NO: 33423 - RNA, 20 nt, Artificial Sequence
  RPE65 RNA guide
auuacaagcauuaaaugaga

SEQ ID NO: 33424 - RNA, 20 nt, Artificial Sequence
  RPE65 RNA guide
auuaucauggaauaaaggag

SEQ ID NO: 33425 - RNA, 20 nt, Artificial Sequence
  RPE65 RNA guide
auuauuaaaccauuggccau

SEQ ID NO: 33426 - RNA, 20 nt, Artificial Sequence
  RPE65 RNA guide
auucaacagacaugacuugc

SEQ ID NO: 33427 - RNA, 20 nt, Artificial Sequence
  RPE65 RNA guide
auuccaugauaauguucccu

SEQ ID NO: 33428 - RNA, 20 nt, Artificial Sequence
  RPE65 RNA guide
auuggaaaggccacugggaa

SEQ ID NO: 33429 - RNA, 20 nt, Artificial Sequence
  RPE65 RNA guide
auuggaggucaacaucuugc

SEQ ID NO: 33430 - RNA, 20 nt, Artificial Sequence
  RPE65 RNA guide
auuggccaucuugauuccuu

SEQ ID NO: 33431 - RNA, 20 nt, Artificial Sequence
  RPE65 RNA guide
auugugagaagaaagugggu

SEQ ID NO: 33432 - RNA, 20 nt, Artificial Sequence
  RPE65 RNA guide
caaagcccuaggcuuuagcu

SEQ ID NO: 33433 - RNA, 20 nt, Artificial Sequence
  RPE65 RNA guide
caaaguagggccuagcuugg

SEQ ID NO: 33434 - RNA, 20 nt, Artificial Sequence
  RPE65 RNA guide
caacagacaugacuugccua

SEQ ID NO: 33435 - RNA, 20 nt, Artificial Sequence
  RPE65 RNA guide
caacaucuugccaagguuac

SEQ ID NO: 33436 - RNA, 20 nt, Artificial Sequence
  RPE65 RNA guide
caacaugaguggcuuuaaac

SEQ ID NO: 33437 - RNA, 20 nt, Artificial Sequence
  RPE65 RNA guide
caaccuauauacccacuuuc

SEQ ID NO: 33438 - RNA, 20 nt, Artificial Sequence
  RPE65 RNA guide
caagaauuggaggucaacau

SEQ ID NO: 33439 - RNA, 20 nt, Artificial Sequence
  RPE65 RNA guide
caagauggccaaugguuuaa

SEQ ID NO: 33440 - RNA, 20 nt, Artificial Sequence
  RPE65 RNA guide
caagauguugaccuccaauu

SEQ ID NO: 33441 - RNA, 20 nt, Artificial Sequence
  RPE65 RNA guide
caagcauuaaaugagagcgc

SEQ ID NO: 33442 - RNA, 20 nt, Artificial Sequence
  RPE65 RNA guide
caagcuaggcccuacuuuga

SEQ ID NO: 33443 - RNA, 20 nt, Artificial Sequence
  RPE65 RNA guide
caagguuacccuccuaggca

SEQ ID NO: 33444 - RNA, 20 nt, Artificial Sequence
  RPE65 RNA guide
caagucaugucuguugaaua

SEQ ID NO: 33445 - RNA, 20 nt, Artificial Sequence
  RPE65 RNA guide
caauguaccugggccagugu

SEQ ID NO: 33446 - RNA, 20 nt, Artificial Sequence
  RPE65 RNA guide
cacaaagcacuucauaauaa

SEQ ID NO: 33447 - RNA, 20 nt, Artificial Sequence
  RPE65 RNA guide
cacaauguaccugggccagu

SEQ ID NO: 33448 - RNA, 20 nt, Artificial Sequence
  RPE65 RNA guide
cacacuggcccagguacauu

SEQ ID NO: 33449 - RNA, 20 nt, Artificial Sequence
  RPE65 RNA guide
cacaugggaggaggagccaa

SEQ ID NO: 33450 - RNA, 20 nt, Artificial Sequence
  RPE65 RNA guide
caccucugaacucaggaggc

SEQ ID NO: 33451 - RNA, 20 nt, Artificial Sequence
  RPE65 RNA guide
cacucauguuggaccccaaa

SEQ ID NO: 33452 - RNA, 20 nt, Artificial Sequence
  RPE65 RNA guide
cacuccaugccacuccuccu

SEQ ID NO: 33453 - RNA, 20 nt, Artificial Sequence
  RPE65 RNA guide
cacuccuccuccucaaagua

SEQ ID NO: 33454 - RNA, 20 nt, Artificial Sequence
  RPE65 RNA guide
cacugcgcucucauuuaaug

SEQ ID NO: 33455 - RNA, 20 nt, Artificial Sequence
  RPE65 RNA guide
cacuggcccagguacauugu

SEQ ID NO: 33456 - RNA, 20 nt, Artificial Sequence
  RPE65 RNA guide
cacuuucuucucacaaugua

SEQ ID NO: 33457 - RNA, 20 nt, Artificial Sequence
  RPE65 RNA guide
cagacacacuggcccaggua

SEQ ID NO: 33458 - RNA, 20 nt, Artificial Sequence
  RPE65 RNA guide
cagacaugacuugccuagga

SEQ ID NO: 33459 - RNA, 20 nt, Artificial Sequence
  RPE65 RNA guide
cagaggugaaaacucacaug

SEQ ID NO: 33460 - RNA, 20 nt, Artificial Sequence
  RPE65 RNA guide
cagcacuccaugccacuccu

SEQ ID NO: 33461 - RNA, 20 nt, Artificial Sequence
  RPE65 RNA guide
caggaggcaaccuauauacc

SEQ ID NO: 33462 - RNA, 20 nt, Artificial Sequence
  RPE65 RNA guide
caggguuuaaagccacucau

SEQ ID NO: 33463 - RNA, 20 nt, Artificial Sequence
  RPE65 RNA guide
cagguacauugugagaagaa

SEQ ID NO: 33464 - RNA, 20 nt, Artificial Sequence
  RPE65 RNA guide
caguggccuuuccaauuuua

SEQ ID NO: 33465 - RNA, 20 nt, Artificial Sequence
  RPE65 RNA guide
cagugugucugcauggauac

SEQ ID NO: 33466 - RNA, 20 nt, Artificial Sequence
  RPE65 RNA guide
caucuugccaagguuacccu

SEQ ID NO: 33467 - RNA, 20 nt, Artificial Sequence
  RPE65 RNA guide
caugacuugccuaggagggu

SEQ ID NO: 33468 - RNA, 20 nt, Artificial Sequence
  RPE65 RNA guide
caugaguggcuuuaaacccu

SEQ ID NO: 33469 - RNA, 20 nt, Artificial Sequence
  RPE65 RNA guide
caugauaauguucccucgua

SEQ ID NO: 33470 - RNA, 20 nt, Artificial Sequence
  RPE65 RNA guide
caugcagacacacuggccca

SEQ ID NO: 33471 - RNA, 20 nt, Artificial Sequence
  RPE65 RNA guide
caugccacuccuccuccuca

SEQ ID NO: 33472 - RNA, 20 nt, Artificial Sequence
  RPE65 RNA guide
cauggaauaaaggagaagcu

SEQ ID NO: 33473 - RNA, 20 nt, Artificial Sequence
  RPE65 RNA guide
cauggauacgagggaacauu

SEQ ID NO: 33474 - RNA, 20 nt, Artificial Sequence
  RPE65 RNA guide
caugggaggaggagccaagc

SEQ ID NO: 33475 - RNA, 20 nt, Artificial Sequence
  RPE65 RNA guide
caugucuguugaauacaggg

SEQ ID NO: 33476 - RNA, 20 nt, Artificial Sequence
  RPE65 RNA guide
caugugaguuuucaccucug

SEQ ID NO: 33477 - RNA, 20 nt, Artificial Sequence
  RPE65 RNA guide
cauguuggaccccaaagccc

SEQ ID NO: 33478 - RNA, 20 nt, Artificial Sequence
  RPE65 RNA guide
cauuaaaugagagcgcagug

SEQ ID NO: 33479 - RNA, 20 nt, Artificial Sequence
  RPE65 RNA guide
cauuacaagcauuaaaugag

SEQ ID NO: 33480 - RNA, 20 nt, Artificial Sequence
  RPE65 RNA guide
cauuaucauggaauaaagga

SEQ ID NO: 33481 - RNA, 20 nt, Artificial Sequence
  RPE65 RNA guide
cauuggccaucuugauuccu

SEQ ID NO: 33482 - RNA, 20 nt, Artificial Sequence
  RPE65 RNA guide
cauugugagaagaaaguggg

SEQ ID NO: 33483 - RNA, 20 nt, Artificial Sequence
  RPE65 RNA guide
ccaaagcccuaggcuuuagc

SEQ ID NO: 33484 - RNA, 20 nt, Artificial Sequence
  RPE65 RNA guide
ccaacaugaguggcuuuaaa

SEQ ID NO: 33485 - RNA, 20 nt, Artificial Sequence
  RPE65 RNA guide
ccaagaauuggaggucaaca

SEQ ID NO: 33486 - RNA, 20 nt, Artificial Sequence
  RPE65 RNA guide
ccaagcuaggcccuacuuug

SEQ ID NO: 33487 - RNA, 20 nt, Artificial Sequence
  RPE65 RNA guide
ccaagguuacccuccuaggc

SEQ ID NO: 33488 - RNA, 20 nt, Artificial Sequence
  RPE65 RNA guide
ccacucauguuggaccccaa

SEQ ID NO: 33489 - RNA, 20 nt, Artificial Sequence
  RPE65 RNA guide
ccacuccuccuccucaaagu

SEQ ID NO: 33490 - RNA, 20 nt, Artificial Sequence
  RPE65 RNA guide
ccacuuucuucucacaaugu

SEQ ID NO: 33491 - RNA, 20 nt, Artificial Sequence
  RPE65 RNA guide
ccagguacauugugagaaga

SEQ ID NO: 33492 - RNA, 20 nt, Artificial Sequence
  RPE65 RNA guide
ccaguggccuuuccaauuuu

SEQ ID NO: 33493 - RNA, 20 nt, Artificial Sequence
  RPE65 RNA guide
ccagugugucugcauggaua

SEQ ID NO: 33494 - RNA, 20 nt, Artificial Sequence
  RPE65 RNA guide
ccaugauaauguucccucgu

SEQ ID NO: 33495 - RNA, 20 nt, Artificial Sequence
  RPE65 RNA guide
ccaugcagacacacuggccc

SEQ ID NO: 33496 - RNA, 20 nt, Artificial Sequence
  RPE65 RNA guide
ccaugccacuccuccuccuc

SEQ ID NO: 33497 - RNA, 20 nt, Artificial Sequence
  RPE65 RNA guide
ccaugugaguuuucaccucu

SEQ ID NO: 33498 - RNA, 20 nt, Artificial Sequence
  RPE65 RNA guide
ccauuggccaucuugauucc

SEQ ID NO: 33499 - RNA, 20 nt, Artificial Sequence
  RPE65 RNA guide
cccaaagcccuaggcuuuag

SEQ ID NO: 33500 - RNA, 20 nt, Artificial Sequence
  RPE65 RNA guide
cccacuuucuucucacaaug

SEQ ID NO: 33501 - RNA, 20 nt, Artificial Sequence
  RPE65 RNA guide
cccagguacauugugagaag

SEQ ID NO: 33502 - RNA, 20 nt, Artificial Sequence
  RPE65 RNA guide
cccaguggccuuuccaauuu

SEQ ID NO: 33503 - RNA, 20 nt, Artificial Sequence
  RPE65 RNA guide
cccaugugaguuuucaccuc

SEQ ID NO: 33504 - RNA, 20 nt, Artificial Sequence
  RPE65 RNA guide
ccccaaagcccuaggcuuua

SEQ ID NO: 33505 - RNA, 20 nt, Artificial Sequence
  RPE65 RNA guide
ccccuuucccaguggccuuu

SEQ ID NO: 33506 - RNA, 20 nt, Artificial Sequence
  RPE65 RNA guide
cccgaccccuuucccagugg

SEQ ID NO: 33507 - RNA, 20 nt, Artificial Sequence
  RPE65 RNA guide
cccuacuuugaggaggagga

SEQ ID NO: 33508 - RNA, 20 nt, Artificial Sequence
  RPE65 RNA guide
cccuaggcuuuagcuucucc

SEQ ID NO: 33509 - RNA, 20 nt, Artificial Sequence
  RPE65 RNA guide
cccuccuaggcaagucaugu

SEQ ID NO: 33510 - RNA, 20 nt, Artificial Sequence
  RPE65 RNA guide
cccucguauccaugcagaca

SEQ ID NO: 33511 - RNA, 20 nt, Artificial Sequence
  RPE65 RNA guide
cccuguauucaacagacaug

SEQ ID NO: 33512 - RNA, 20 nt, Artificial Sequence
  RPE65 RNA guide
cccuuucccaguggccuuuc

SEQ ID NO: 33513 - RNA, 20 nt, Artificial Sequence
  RPE65 RNA guide
ccgaccccuuucccaguggc

SEQ ID NO: 33514 - RNA, 20 nt, Artificial Sequence
  RPE65 RNA guide
ccuacuuugaggaggaggag

SEQ ID NO: 33515 - RNA, 20 nt, Artificial Sequence
  RPE65 RNA guide
ccuagcuuggcuccuccucc

SEQ ID NO: 33516 - RNA, 20 nt, Artificial Sequence
  RPE65 RNA guide
ccuaggaggguaaccuuggc

SEQ ID NO: 33517 - RNA, 20 nt, Artificial Sequence
  RPE65 RNA guide
ccuaggcaagucaugucugu

SEQ ID NO: 33518 - RNA, 20 nt, Artificial Sequence
  RPE65 RNA guide
ccuaggcuuuagcuucuccu

SEQ ID NO: 33519 - RNA, 20 nt, Artificial Sequence
  RPE65 RNA guide
ccuagggcuuugggguccaa

SEQ ID NO: 33520 - RNA, 20 nt, Artificial Sequence
  RPE65 RNA guide
ccuauauacccacuuucuuc

SEQ ID NO: 33521 - RNA, 20 nt, Artificial Sequence
  RPE65 RNA guide
ccucaaaguagggccuagcu

SEQ ID NO: 33522 - RNA, 20 nt, Artificial Sequence
  RPE65 RNA guide
ccucccaugugaguuuucac

SEQ ID NO: 33523 - RNA, 20 nt, Artificial Sequence
  RPE65 RNA guide
ccuccuaggcaagucauguc

SEQ ID NO: 33524 - RNA, 20 nt, Artificial Sequence
  RPE65 RNA guide
ccuccucaaaguagggccua

SEQ ID NO: 33525 - RNA, 20 nt, Artificial Sequence
  RPE65 RNA guide
ccuccucccaugugaguuuu

SEQ ID NO: 33526 - RNA, 20 nt, Artificial Sequence
  RPE65 RNA guide
ccuccuccucaaaguagggc

SEQ ID NO: 33527 - RNA, 20 nt, Artificial Sequence
  RPE65 RNA guide
ccuccugaguucagagguga

SEQ ID NO: 33528 - RNA, 20 nt, Artificial Sequence
  RPE65 RNA guide
ccucguauccaugcagacac

SEQ ID NO: 33529 - RNA, 20 nt, Artificial Sequence
  RPE65 RNA guide
ccucugaacucaggaggcaa

SEQ ID NO: 33530 - RNA, 20 nt, Artificial Sequence
  RPE65 RNA guide
ccugaguucagaggugaaaa

SEQ ID NO: 33531 - RNA, 20 nt, Artificial Sequence
  RPE65 RNA guide
ccugggccagugugucugca

SEQ ID NO: 33532 - RNA, 20 nt, Artificial Sequence
  RPE65 RNA guide
ccuguauucaacagacauga

SEQ ID NO: 33533 - RNA, 20 nt, Artificial Sequence
  RPE65 RNA guide
ccuuggcaagauguugaccu

SEQ ID NO: 33534 - RNA, 20 nt, Artificial Sequence
  RPE65 RNA guide
ccuuuauuccaugauaaugu

SEQ ID NO: 33535 - RNA, 20 nt, Artificial Sequence
  RPE65 RNA guide
ccuuucccaguggccuuucc

SEQ ID NO: 33536 - RNA, 20 nt, Artificial Sequence
  RPE65 RNA guide
cgaccccuuucccaguggcc

SEQ ID NO: 33537 - RNA, 20 nt, Artificial Sequence
  RPE65 RNA guide
cgagggaacauuaucaugga

SEQ ID NO: 33538 - RNA, 20 nt, Artificial Sequence
  RPE65 RNA guide
cgcucucauuuaaugcuugu

SEQ ID NO: 33539 - RNA, 20 nt, Artificial Sequence
  RPE65 RNA guide
cguauccaugcagacacacu

SEQ ID NO: 33540 - RNA, 20 nt, Artificial Sequence
  RPE65 RNA guide
cuaaagccuagggcuuuggg

SEQ ID NO: 33541 - RNA, 20 nt, Artificial Sequence
  RPE65 RNA guide
cuacuuugaggaggaggagu

SEQ ID NO: 33542 - RNA, 20 nt, Artificial Sequence
  RPE65 RNA guide
cuagacacugcgcucucauu

SEQ ID NO: 33543 - RNA, 20 nt, Artificial Sequence
  RPE65 RNA guide
cuagcuuggcuccuccuccc

SEQ ID NO: 33544 - RNA, 20 nt, Artificial Sequence
  RPE65 RNA guide
cuaggaggguaaccuuggca

SEQ ID NO: 33545 - RNA, 20 nt, Artificial Sequence
  RPE65 RNA guide
cuaggcaagucaugucuguu

SEQ ID NO: 33546 - RNA, 20 nt, Artificial Sequence
  RPE65 RNA guide
cuaggcccuacuuugaggag

SEQ ID NO: 33547 - RNA, 20 nt, Artificial Sequence
  RPE65 RNA guide
cuaggcuuuagcuucuccuu

SEQ ID NO: 33548 - RNA, 20 nt, Artificial Sequence
  RPE65 RNA guide
cuagggcuuugggguccaac

SEQ ID NO: 33549 - RNA, 20 nt, Artificial Sequence
  RPE65 RNA guide
cuauauacccacuuucuucu

SEQ ID NO: 33550 - RNA, 20 nt, Artificial Sequence
  RPE65 RNA guide
cucaaaguagggccuagcuu

SEQ ID NO: 33551 - RNA, 20 nt, Artificial Sequence
  RPE65 RNA guide
cucacaauguaccugggcca

SEQ ID NO: 33552 - RNA, 20 nt, Artificial Sequence
  RPE65 RNA guide
cucacaugggaggaggagcc

SEQ ID NO: 33553 - RNA, 20 nt, Artificial Sequence
  RPE65 RNA guide
cucaggaggcaaccuauaua

SEQ ID NO: 33554 - RNA, 20 nt, Artificial Sequence
  RPE65 RNA guide
cucauguuggaccccaaagc

SEQ ID NO: 33555 - RNA, 20 nt, Artificial Sequence
  RPE65 RNA guide
cuccaugccacuccuccucc

SEQ ID NO: 33556 - RNA, 20 nt, Artificial Sequence
  RPE65 RNA guide
cucccaugugaguuuucacc

SEQ ID NO: 33557 - RNA, 20 nt, Artificial Sequence
  RPE65 RNA guide
cuccuaggcaagucaugucu

SEQ ID NO: 33558 - RNA, 20 nt, Artificial Sequence
  RPE65 RNA guide
cuccucaaaguagggccuag

SEQ ID NO: 33559 - RNA, 20 nt, Artificial Sequence
  RPE65 RNA guide
cuccucccaugugaguuuuc

SEQ ID NO: 33560 - RNA, 20 nt, Artificial Sequence
  RPE65 RNA guide
cuccuccucaaaguagggcc

SEQ ID NO: 33561 - RNA, 20 nt, Artificial Sequence
  RPE65 RNA guide
cuccuccucccaugugaguu

SEQ ID NO: 33562 - RNA, 20 nt, Artificial Sequence
  RPE65 RNA guide
cuccuccuccucaaaguagg

SEQ ID NO: 33563 - RNA, 20 nt, Artificial Sequence
  RPE65 RNA guide
cuccugaguucagaggugaa

SEQ ID NO: 33564 - RNA, 20 nt, Artificial Sequence
  RPE65 RNA guide
cuccuuuauuccaugauaau

SEQ ID NO: 33565 - RNA, 20 nt, Artificial Sequence
  RPE65 RNA guide
cucguauccaugcagacaca

SEQ ID NO: 33566 - RNA, 20 nt, Artificial Sequence
  RPE65 RNA guide
cucugaacucaggaggcaac

SEQ ID NO: 33567 - RNA, 20 nt, Artificial Sequence
  RPE65 RNA guide
cugaacucaggaggcaaccu

SEQ ID NO: 33568 - RNA, 20 nt, Artificial Sequence
  RPE65 RNA guide
cugaguucagaggugaaaac

SEQ ID NO: 33569 - RNA, 20 nt, Artificial Sequence
  RPE65 RNA guide
cugcauggauacgagggaac

SEQ ID NO: 33570 - RNA, 20 nt, Artificial Sequence
  RPE65 RNA guide
cugcgcucucauuuaaugcu

SEQ ID NO: 33571 - RNA, 20 nt, Artificial Sequence
  RPE65 RNA guide
cuggcccagguacauuguga

SEQ ID NO: 33572 - RNA, 20 nt, Artificial Sequence
  RPE65 RNA guide
cugggccagugugucugcau

SEQ ID NO: 33573 - RNA, 20 nt, Artificial Sequence
  RPE65 RNA guide
cuguauucaacagacaugac

SEQ ID NO: 33574 - RNA, 20 nt, Artificial Sequence
  RPE65 RNA guide
cuguugaauacaggguuuaa

SEQ ID NO: 33575 - RNA, 20 nt, Artificial Sequence
  RPE65 RNA guide
cuucucacaauguaccuggg

SEQ ID NO: 33576 - RNA, 20 nt, Artificial Sequence
  RPE65 RNA guide
cuucuccuuuauuccaugau

SEQ ID NO: 33577 - RNA, 20 nt, Artificial Sequence
  RPE65 RNA guide
cuugccaagguuacccuccu

SEQ ID NO: 33578 - RNA, 20 nt, Artificial Sequence
  RPE65 RNA guide
cuugccuaggaggguaaccu

SEQ ID NO: 33579 - RNA, 20 nt, Artificial Sequence
  RPE65 RNA guide
cuuggcaagauguugaccuc

SEQ ID NO: 33580 - RNA, 20 nt, Artificial Sequence
  RPE65 RNA guide
cuuggcuccuccucccaugu

SEQ ID NO: 33581 - RNA, 20 nt, Artificial Sequence
  RPE65 RNA guide
cuuuaaacccuguauucaac

SEQ ID NO: 33582 - RNA, 20 nt, Artificial Sequence
  RPE65 RNA guide
cuuuagcuucuccuuuauuc

SEQ ID NO: 33583 - RNA, 20 nt, Artificial Sequence
  RPE65 RNA guide
cuuuauuccaugauaauguu

SEQ ID NO: 33584 - RNA, 20 nt, Artificial Sequence
  RPE65 RNA guide
cuuucccaguggccuuucca

SEQ ID NO: 33585 - RNA, 20 nt, Artificial Sequence
  RPE65 RNA guide
cuuucuucucacaauguacc

SEQ ID NO: 33586 - RNA, 20 nt, Artificial Sequence
  RPE65 RNA guide
cuuugaggaggaggaguggc

SEQ ID NO: 33587 - RNA, 20 nt, Artificial Sequence
  RPE65 RNA guide
cuuugggguccaacaugagu

SEQ ID NO: 33588 - RNA, 20 nt, Artificial Sequence
  RPE65 RNA guide
gaaaaaggaaucaagauggc

SEQ ID NO: 33589 - RNA, 20 nt, Artificial Sequence
  RPE65 RNA guide
gaaaacucacaugggaggag

SEQ ID NO: 33590 - RNA, 20 nt, Artificial Sequence
  RPE65 RNA guide
gaaaggccacugggaaaggg

SEQ ID NO: 33591 - RNA, 20 nt, Artificial Sequence
  RPE65 RNA guide
gaaaguggguauauagguug

SEQ ID NO: 33592 - RNA, 20 nt, Artificial Sequence
  RPE65 RNA guide
gaacauuaucauggaauaaa

SEQ ID NO: 33593 - RNA, 20 nt, Artificial Sequence
  RPE65 RNA guide
gaacucaggaggcaaccuau

SEQ ID NO: 33594 - RNA, 20 nt, Artificial Sequence
  RPE65 RNA guide
gaagaaaguggguauauagg

SEQ ID NO: 33595 - RNA, 20 nt, Artificial Sequence
  RPE65 RNA guide
gaagcuaaagccuagggcuu

SEQ ID NO: 33596 - RNA, 20 nt, Artificial Sequence
  RPE65 RNA guide
gaauaaaggagaagcuaaag

SEQ ID NO: 33597 - RNA, 20 nt, Artificial Sequence
  RPE65 RNA guide
gaauacaggguuuaaagcca

SEQ ID NO: 33598 - RNA, 20 nt, Artificial Sequence
  RPE65 RNA guide
gaaucaagauggccaauggu

SEQ ID NO: 33599 - RNA, 20 nt, Artificial Sequence
  RPE65 RNA guide
gaauuggaggucaacaucuu

SEQ ID NO: 33600 - RNA, 20 nt, Artificial Sequence
  RPE65 RNA guide
gacacacuggcccagguaca

SEQ ID NO: 33601 - RNA, 20 nt, Artificial Sequence
  RPE65 RNA guide
gacacugcgcucucauuuaa

SEQ ID NO: 33602 - RNA, 20 nt, Artificial Sequence
  RPE65 RNA guide
gacaugacuugccuaggagg

SEQ ID NO: 33603 - RNA, 20 nt, Artificial Sequence
  RPE65 RNA guide
gaccccaaagcccuaggcuu

SEQ ID NO: 33604 - RNA, 20 nt, Artificial Sequence
  RPE65 RNA guide
gaccccuuucccaguggccu

SEQ ID NO: 33605 - RNA, 20 nt, Artificial Sequence
  RPE65 RNA guide
gaccuccaauucuugguuuu

SEQ ID NO: 33606 - RNA, 20 nt, Artificial Sequence
  RPE65 RNA guide
gacuugccuaggaggguaac

SEQ ID NO: 33607 - RNA, 20 nt, Artificial Sequence
  RPE65 RNA guide
gagaagaaaguggguauaua

SEQ ID NO: 33608 - RNA, 20 nt, Artificial Sequence
  RPE65 RNA guide
gagaagcuaaagccuagggc

SEQ ID NO: 33609 - RNA, 20 nt, Artificial Sequence
  RPE65 RNA guide
gagccaagcuaggcccuacu

SEQ ID NO: 33610 - RNA, 20 nt, Artificial Sequence
  RPE65 RNA guide
gaggagccaagcuaggcccu

SEQ ID NO: 33611 - RNA, 20 nt, Artificial Sequence
  RPE65 RNA guide
gaggaggagccaagcuaggc

SEQ ID NO: 33612 - RNA, 20 nt, Artificial Sequence
  RPE65 RNA guide
gaggaggaggaguggcaugg

SEQ ID NO: 33613 - RNA, 20 nt, Artificial Sequence
  RPE65 RNA guide
gaggaggaguggcauggagu

SEQ ID NO: 33614 - RNA, 20 nt, Artificial Sequence
  RPE65 RNA guide
gaggaguggcauggagugcu

SEQ ID NO: 33615 - RNA, 20 nt, Artificial Sequence
  RPE65 RNA guide
gaggcaaccuauauacccac

SEQ ID NO: 33616 - RNA, 20 nt, Artificial Sequence
  RPE65 RNA guide
gagggaacauuaucauggaa

SEQ ID NO: 33617 - RNA, 20 nt, Artificial Sequence
  RPE65 RNA guide
gaggguaaccuuggcaagau

SEQ ID NO: 33618 - RNA, 20 nt, Artificial Sequence
  RPE65 RNA guide
gaggucaacaucuugccaag

SEQ ID NO: 33619 - RNA, 20 nt, Artificial Sequence
  RPE65 RNA guide
gaggugaaaacucacauggg

SEQ ID NO: 33620 - RNA, 20 nt, Artificial Sequence
  RPE65 RNA guide
gaguggcauggagugcugcu

SEQ ID NO: 33621 - RNA, 20 nt, Artificial Sequence
  RPE65 RNA guide
gaguggcuuuaaacccugua

SEQ ID NO: 33622 - RNA, 20 nt, Artificial Sequence
  RPE65 RNA guide
gaguucagaggugaaaacuc

SEQ ID NO: 33623 - RNA, 20 nt, Artificial Sequence
  RPE65 RNA guide
gaguuuucaccucugaacuc

SEQ ID NO: 33624 - RNA, 20 nt, Artificial Sequence
  RPE65 RNA guide
gauaauguucccucguaucc

SEQ ID NO: 33625 - RNA, 20 nt, Artificial Sequence
  RPE65 RNA guide
gauacgagggaacauuauca

SEQ ID NO: 33626 - RNA, 20 nt, Artificial Sequence
  RPE65 RNA guide
gauguugaccuccaauucuu

SEQ ID NO: 33627 - RNA, 20 nt, Artificial Sequence
  RPE65 RNA guide
gcaaccuauauacccacuuu

SEQ ID NO: 33628 - RNA, 20 nt, Artificial Sequence
  RPE65 RNA guide
gcaagauguugaccuccaau

SEQ ID NO: 33629 - RNA, 20 nt, Artificial Sequence
  RPE65 RNA guide
gcaagucaugucuguugaau

SEQ ID NO: 33630 - RNA, 20 nt, Artificial Sequence
  RPE65 RNA guide
gcacuccaugccacuccucc

SEQ ID NO: 33631 - RNA, 20 nt, Artificial Sequence
  RPE65 RNA guide
gcagacacacuggcccaggu

SEQ ID NO: 33632 - RNA, 20 nt, Artificial Sequence
  RPE65 RNA guide
gcagcacuccaugccacucc

SEQ ID NO: 33633 - RNA, 20 nt, Artificial Sequence
  RPE65 RNA guide
gcauggauacgagggaacau

SEQ ID NO: 33634 - RNA, 20 nt, Artificial Sequence
  RPE65 RNA guide
gcauuaaaugagagcgcagu

SEQ ID NO: 33635 - RNA, 20 nt, Artificial Sequence
  RPE65 RNA guide
gccaagcuaggcccuacuuu

SEQ ID NO: 33636 - RNA, 20 nt, Artificial Sequence
  RPE65 RNA guide
gccaagguuacccuccuagg

SEQ ID NO: 33637 - RNA, 20 nt, Artificial Sequence
  RPE65 RNA guide
gccacucauguuggacccca

SEQ ID NO: 33638 - RNA, 20 nt, Artificial Sequence
  RPE65 RNA guide
gccacuccuccuccucaaag

SEQ ID NO: 33639 - RNA, 20 nt, Artificial Sequence
  RPE65 RNA guide
gccagugugucugcauggau

SEQ ID NO: 33640 - RNA, 20 nt, Artificial Sequence
  RPE65 RNA guide
gccaucuugauuccuuuuuc

SEQ ID NO: 33641 - RNA, 20 nt, Artificial Sequence
  RPE65 RNA guide
gcccagguacauugugagaa

SEQ ID NO: 33642 - RNA, 20 nt, Artificial Sequence
  RPE65 RNA guide
gcccuacuuugaggaggagg

SEQ ID NO: 33643 - RNA, 20 nt, Artificial Sequence
  RPE65 RNA guide
gcccuaggcuuuagcuucuc

SEQ ID NO: 33644 - RNA, 20 nt, Artificial Sequence
  RPE65 RNA guide
gccuagcuuggcuccuccuc

SEQ ID NO: 33645 - RNA, 20 nt, Artificial Sequence
  RPE65 RNA guide
gccuaggaggguaaccuugg

SEQ ID NO: 33646 - RNA, 20 nt, Artificial Sequence
  RPE65 RNA guide
gccuagggcuuuggggucca

SEQ ID NO: 33647 - RNA, 20 nt, Artificial Sequence
  RPE65 RNA guide
gccuccugaguucagaggug

SEQ ID NO: 33648 - RNA, 20 nt, Artificial Sequence
  RPE65 RNA guide
gcgcucucauuuaaugcuug

SEQ ID NO: 33649 - RNA, 20 nt, Artificial Sequence
  RPE65 RNA guide
gcuaaagccuagggcuuugg

SEQ ID NO: 33650 - RNA, 20 nt, Artificial Sequence
  RPE65 RNA guide
gcuagacacugcgcucucau

SEQ ID NO: 33651 - RNA, 20 nt, Artificial Sequence
  RPE65 RNA guide
gcuaggcccuacuuugagga

SEQ ID NO: 33652 - RNA, 20 nt, Artificial Sequence
  RPE65 RNA guide
gcuauuauuaugaagugcuu

SEQ ID NO: 33653 - RNA, 20 nt, Artificial Sequence
  RPE65 RNA guide
gcuccuccucccaugugagu

SEQ ID NO: 33654 - RNA, 20 nt, Artificial Sequence
  RPE65 RNA guide
gcucucauuuaaugcuugua

SEQ ID NO: 33655 - RNA, 20 nt, Artificial Sequence
  RPE65 RNA guide
gcuucuccuuuauuccauga

SEQ ID NO: 33656 - RNA, 20 nt, Artificial Sequence
  RPE65 RNA guide
gcuuggcuccuccucccaug

SEQ ID NO: 33657 - RNA, 20 nt, Artificial Sequence
  RPE65 RNA guide
gcuuuaaacccuguauucaa

SEQ ID NO: 33658 - RNA, 20 nt, Artificial Sequence
  RPE65 RNA guide
gcuuuagcuucuccuuuauu

SEQ ID NO: 33659 - RNA, 20 nt, Artificial Sequence
  RPE65 RNA guide
gcuuugggguccaacaugag

SEQ ID NO: 33660 - RNA, 20 nt, Artificial Sequence
  RPE65 RNA guide
ggaaaggccacugggaaagg

SEQ ID NO: 33661 - RNA, 20 nt, Artificial Sequence
  RPE65 RNA guide
ggaacauuaucauggaauaa

SEQ ID NO: 33662 - RNA, 20 nt, Artificial Sequence
  RPE65 RNA guide
ggaauaaaggagaagcuaaa

SEQ ID NO: 33663 - RNA, 20 nt, Artificial Sequence
  RPE65 RNA guide
ggaaucaagauggccaaugg

SEQ ID NO: 33664 - RNA, 20 nt, Artificial Sequence
  RPE65 RNA guide
ggaccccaaagcccuaggcu

SEQ ID NO: 33665 - RNA, 20 nt, Artificial Sequence
  RPE65 RNA guide
ggagaagcuaaagccuaggg

SEQ ID NO: 33666 - RNA, 20 nt, Artificial Sequence
  RPE65 RNA guide
ggagccaagcuaggcccuac

SEQ ID NO: 33667 - RNA, 20 nt, Artificial Sequence
  RPE65 RNA guide
ggaggagccaagcuaggccc

SEQ ID NO: 33668 - RNA, 20 nt, Artificial Sequence
  RPE65 RNA guide
ggaggaggagccaagcuagg

SEQ ID NO: 33669 - RNA, 20 nt, Artificial Sequence
  RPE65 RNA guide
ggaggaggaguggcauggag

SEQ ID NO: 33670 - RNA, 20 nt, Artificial Sequence
  RPE65 RNA guide
ggaggaguggcauggagugc

SEQ ID NO: 33671 - RNA, 20 nt, Artificial Sequence
  RPE65 RNA guide
ggaggcaaccuauauaccca

SEQ ID NO: 33672 - RNA, 20 nt, Artificial Sequence
  RPE65 RNA guide
ggaggguaaccuuggcaaga

SEQ ID NO: 33673 - RNA, 20 nt, Artificial Sequence
  RPE65 RNA guide
ggaggucaacaucuugccaa

SEQ ID NO: 33674 - RNA, 20 nt, Artificial Sequence
  RPE65 RNA guide
ggaguggcauggagugcugc

SEQ ID NO: 33675 - RNA, 20 nt, Artificial Sequence
  RPE65 RNA guide
ggauacgagggaacauuauc

SEQ ID NO: 33676 - RNA, 20 nt, Artificial Sequence
  RPE65 RNA guide
ggcaaccuauauacccacuu

SEQ ID NO: 33677 - RNA, 20 nt, Artificial Sequence
  RPE65 RNA guide
ggcaagauguugaccuccaa

SEQ ID NO: 33678 - RNA, 20 nt, Artificial Sequence
  RPE65 RNA guide
ggcaagucaugucuguugaa

SEQ ID NO: 33679 - RNA, 20 nt, Artificial Sequence
  RPE65 RNA guide
ggccagugugucugcaugga

SEQ ID NO: 33680 - RNA, 20 nt, Artificial Sequence
  RPE65 RNA guide
ggccaucuugauuccuuuuu

SEQ ID NO: 33681 - RNA, 20 nt, Artificial Sequence
  RPE65 RNA guide
ggcccagguacauugugaga

SEQ ID NO: 33682 - RNA, 20 nt, Artificial Sequence
  RPE65 RNA guide
ggcccuacuuugaggaggag

SEQ ID NO: 33683 - RNA, 20 nt, Artificial Sequence
  RPE65 RNA guide
ggccuagcuuggcuccuccu

SEQ ID NO: 33684 - RNA, 20 nt, Artificial Sequence
  RPE65 RNA guide
ggcuccuccucccaugugag

SEQ ID NO: 33685 - RNA, 20 nt, Artificial Sequence
  RPE65 RNA guide
ggcuuuaaacccuguauuca

SEQ ID NO: 33686 - RNA, 20 nt, Artificial Sequence
  RPE65 RNA guide
ggcuuuagcuucuccuuuau

SEQ ID NO: 33687 - RNA, 20 nt, Artificial Sequence
  RPE65 RNA guide
ggcuuugggguccaacauga

SEQ ID NO: 33688 - RNA, 20 nt, Artificial Sequence
  RPE65 RNA guide
gggaacauuaucauggaaua

SEQ ID NO: 33689 - RNA, 20 nt, Artificial Sequence
  RPE65 RNA guide
gggagaaauaauagaaucua

SEQ ID NO: 33690 - RNA, 20 nt, Artificial Sequence
  RPE65 RNA guide
gggaggaggagccaagcuag

SEQ ID NO: 33691 - RNA, 20 nt, Artificial Sequence
  RPE65 RNA guide
gggccagugugucugcaugg

SEQ ID NO: 33692 - RNA, 20 nt, Artificial Sequence
  RPE65 RNA guide
gggccuagcuuggcuccucc

SEQ ID NO: 33693 - RNA, 20 nt, Artificial Sequence
  RPE65 RNA guide
gggcuuugggguccaacaug

SEQ ID NO: 33694 - RNA, 20 nt, Artificial Sequence
  RPE65 RNA guide
gggguccaacaugaguggcu

SEQ ID NO: 33695 - RNA, 20 nt, Artificial Sequence
  RPE65 RNA guide
ggguaaccuuggcaagaugu

SEQ ID NO: 33696 - RNA, 20 nt, Artificial Sequence
  RPE65 RNA guide
ggguauauagguugccuccu

SEQ ID NO: 33697 - RNA, 20 nt, Artificial Sequence
  RPE65 RNA guide
ggguccaacaugaguggcuu

SEQ ID NO: 33698 - RNA, 20 nt, Artificial Sequence
  RPE65 RNA guide
ggguuuaaagccacucaugu

SEQ ID NO: 33699 - RNA, 20 nt, Artificial Sequence
  RPE65 RNA guide
gguaaccuuggcaagauguu

SEQ ID NO: 33700 - RNA, 20 nt, Artificial Sequence
  RPE65 RNA guide
gguacauugugagaagaaag

SEQ ID NO: 33701 - RNA, 20 nt, Artificial Sequence
  RPE65 RNA guide
gguagauucuauuauuucuc

SEQ ID NO: 33702 - RNA, 20 nt, Artificial Sequence
  RPE65 RNA guide
gguauauagguugccuccug

SEQ ID NO: 33703 - RNA, 20 nt, Artificial Sequence
  RPE65 RNA guide
ggucaacaucuugccaaggu

SEQ ID NO: 33704 - RNA, 20 nt, Artificial Sequence
  RPE65 RNA guide
gguccaacaugaguggcuuu

SEQ ID NO: 33705 - RNA, 20 nt, Artificial Sequence
  RPE65 RNA guide
ggugaaaacucacaugggag

SEQ ID NO: 33706 - RNA, 20 nt, Artificial Sequence
  RPE65 RNA guide
gguuacccuccuaggcaagu

SEQ ID NO: 33707 - RNA, 20 nt, Artificial Sequence
  RPE65 RNA guide
gguugccuccugaguucaga

SEQ ID NO: 33708 - RNA, 20 nt, Artificial Sequence
  RPE65 RNA guide
gguuuaaagccacucauguu

SEQ ID NO: 33709 - RNA, 20 nt, Artificial Sequence
  RPE65 RNA guide
guaaagcagcacuccaugcc

SEQ ID NO: 33710 - RNA, 20 nt, Artificial Sequence
  RPE65 RNA guide
guaaccuuggcaagauguug

SEQ ID NO: 33711 - RNA, 20 nt, Artificial Sequence
  RPE65 RNA guide
guacauugugagaagaaagu

SEQ ID NO: 33712 - RNA, 20 nt, Artificial Sequence
  RPE65 RNA guide
guaccugggccagugugucu

SEQ ID NO: 33713 - RNA, 20 nt, Artificial Sequence
  RPE65 RNA guide
guagggccuagcuuggcucc

SEQ ID NO: 33714 - RNA, 20 nt, Artificial Sequence
  RPE65 RNA guide
guauauagguugccuccuga

SEQ ID NO: 33715 - RNA, 20 nt, Artificial Sequence
  RPE65 RNA guide
guauccaugcagacacacug

SEQ ID NO: 33716 - RNA, 20 nt, Artificial Sequence
  RPE65 RNA guide
guauucaacagacaugacuu

SEQ ID NO: 33717 - RNA, 20 nt, Artificial Sequence
  RPE65 RNA guide
gucaacaucuugccaagguu

SEQ ID NO: 33718 - RNA, 20 nt, Artificial Sequence
  RPE65 RNA guide
gucaugucuguugaauacag

SEQ ID NO: 33719 - RNA, 20 nt, Artificial Sequence
  RPE65 RNA guide
guccaacaugaguggcuuua

SEQ ID NO: 33720 - RNA, 20 nt, Artificial Sequence
  RPE65 RNA guide
gucugcauggauacgaggga

SEQ ID NO: 33721 - RNA, 20 nt, Artificial Sequence
  RPE65 RNA guide
gucuguugaauacaggguuu

SEQ ID NO: 33722 - RNA, 20 nt, Artificial Sequence
  RPE65 RNA guide
gugaaaacucacaugggagg

SEQ ID NO: 33723 - RNA, 20 nt, Artificial Sequence
  RPE65 RNA guide
gugagaagaaaguggguaua

SEQ ID NO: 33724 - RNA, 20 nt, Artificial Sequence
  RPE65 RNA guide
gugaguuuucaccucugaac

SEQ ID NO: 33725 - RNA, 20 nt, Artificial Sequence
  RPE65 RNA guide
guggcuuuaaacccuguauu

SEQ ID NO: 33726 - RNA, 20 nt, Artificial Sequence
  RPE65 RNA guide
guggguauauagguugccuc

SEQ ID NO: 33727 - RNA, 20 nt, Artificial Sequence
  RPE65 RNA guide
gugucugcauggauacgagg

SEQ ID NO: 33728 - RNA, 20 nt, Artificial Sequence
  RPE65 RNA guide
gugugucugcauggauacga

SEQ ID NO: 33729 - RNA, 20 nt, Artificial Sequence
  RPE65 RNA guide
guuacccuccuaggcaaguc

SEQ ID NO: 33730 - RNA, 20 nt, Artificial Sequence
  RPE65 RNA guide
guucagaggugaaaacucac

SEQ ID NO: 33731 - RNA, 20 nt, Artificial Sequence
  RPE65 RNA guide
guucccucguauccaugcag

SEQ ID NO: 33732 - RNA, 20 nt, Artificial Sequence
  RPE65 RNA guide
guugaauacaggguuuaaag

SEQ ID NO: 33733 - RNA, 20 nt, Artificial Sequence
  RPE65 RNA guide
guugaccuccaauucuuggu

SEQ ID NO: 33734 - RNA, 20 nt, Artificial Sequence
  RPE65 RNA guide
guugccuccugaguucagag

SEQ ID NO: 33735 - RNA, 20 nt, Artificial Sequence
  RPE65 RNA guide
guuggaccccaaagcccuag

SEQ ID NO: 33736 - RNA, 20 nt, Artificial Sequence
  RPE65 RNA guide
guuuaaagccacucauguug

SEQ ID NO: 33737 - RNA, 20 nt, Artificial Sequence
  RPE65 RNA guide
guuuucaccucugaacucag

SEQ ID NO: 33738 - RNA, 20 nt, Artificial Sequence
  RPE65 RNA guide
uaaaaccaagaauuggaggu

SEQ ID NO: 33739 - RNA, 20 nt, Artificial Sequence
  RPE65 RNA guide
uaaaauuggaaaggccacug

SEQ ID NO: 33740 - RNA, 20 nt, Artificial Sequence
  RPE65 RNA guide
uaaaccauuggccaucuuga

SEQ ID NO: 33741 - RNA, 20 nt, Artificial Sequence
  RPE65 RNA guide
uaaacccuguauucaacaga

SEQ ID NO: 33742 - RNA, 20 nt, Artificial Sequence
  RPE65 RNA guide
uaaagcagcacuccaugcca

SEQ ID NO: 33743 - RNA, 20 nt, Artificial Sequence
  RPE65 RNA guide
uaaagccacucauguuggac

SEQ ID NO: 33744 - RNA, 20 nt, Artificial Sequence
  RPE65 RNA guide
uaaagccuagggcuuugggg

SEQ ID NO: 33745 - RNA, 20 nt, Artificial Sequence
  RPE65 RNA guide
uaaaggagaagcuaaagccu

SEQ ID NO: 33746 - RNA, 20 nt, Artificial Sequence
  RPE65 RNA guide
uaaccuuggcaagauguuga

SEQ ID NO: 33747 - RNA, 20 nt, Artificial Sequence
  RPE65 RNA guide
uaauguucccucguauccau

SEQ ID NO: 33748 - RNA, 20 nt, Artificial Sequence
  RPE65 RNA guide
uacaagcauuaaaugagagc

SEQ ID NO: 33749 - RNA, 20 nt, Artificial Sequence
  RPE65 RNA guide
uacaggguuuaaagccacuc

SEQ ID NO: 33750 - RNA, 20 nt, Artificial Sequence
  RPE65 RNA guide
uacauugugagaagaaagug

SEQ ID NO: 33751 - RNA, 20 nt, Artificial Sequence
  RPE65 RNA guide
uacccacuuucuucucacaa

SEQ ID NO: 33752 - RNA, 20 nt, Artificial Sequence
  RPE65 RNA guide
uacccuccuaggcaagucau

SEQ ID NO: 33753 - RNA, 20 nt, Artificial Sequence
  RPE65 RNA guide
uaccugggccagugugucug

SEQ ID NO: 33754 - RNA, 20 nt, Artificial Sequence
  RPE65 RNA guide
uacgagggaacauuaucaug

SEQ ID NO: 33755 - RNA, 20 nt, Artificial Sequence
  RPE65 RNA guide
uacuuugaggaggaggagug

SEQ ID NO: 33756 - RNA, 20 nt, Artificial Sequence
  RPE65 RNA guide
uagacacugcgcucucauuu

SEQ ID NO: 33757 - RNA, 20 nt, Artificial Sequence
  RPE65 RNA guide
uagcuucuccuuuauuccau

SEQ ID NO: 33758 - RNA, 20 nt, Artificial Sequence
  RPE65 RNA guide
uagcuuggcuccuccuccca

SEQ ID NO: 33759 - RNA, 20 nt, Artificial Sequence
  RPE65 RNA guide
uaggaggguaaccuuggcaa

SEQ ID NO: 33760 - RNA, 20 nt, Artificial Sequence
  RPE65 RNA guide
uaggcaagucaugucuguug

SEQ ID NO: 33761 - RNA, 20 nt, Artificial Sequence
  RPE65 RNA guide
uaggcccuacuuugaggagg

SEQ ID NO: 33762 - RNA, 20 nt, Artificial Sequence
  RPE65 RNA guide
uaggcuuuagcuucuccuuu

SEQ ID NO: 33763 - RNA, 20 nt, Artificial Sequence
  RPE65 RNA guide
uagggccuagcuuggcuccu

SEQ ID NO: 33764 - RNA, 20 nt, Artificial Sequence
  RPE65 RNA guide
uagggcuuugggguccaaca

SEQ ID NO: 33765 - RNA, 20 nt, Artificial Sequence
  RPE65 RNA guide
uagguugccuccugaguuca

SEQ ID NO: 33766 - RNA, 20 nt, Artificial Sequence
  RPE65 RNA guide
uauaaaaccaagaauuggag

SEQ ID NO: 33767 - RNA, 20 nt, Artificial Sequence
  RPE65 RNA guide
uauaaaauuggaaaggccac

SEQ ID NO: 33768 - RNA, 20 nt, Artificial Sequence
  RPE65 RNA guide
uauacccacuuucuucucac

SEQ ID NO: 33769 - RNA, 20 nt, Artificial Sequence
  RPE65 RNA guide
uauagguugccuccugaguu

SEQ ID NO: 33770 - RNA, 20 nt, Artificial Sequence
  RPE65 RNA guide
uauauacccacuuucuucuc

SEQ ID NO: 33771 - RNA, 20 nt, Artificial Sequence
  RPE65 RNA guide
uauauagguugccuccugag

SEQ ID NO: 33772 - RNA, 20 nt, Artificial Sequence
  RPE65 RNA guide
uaucauggaauaaaggagaa

SEQ ID NO: 33773 - RNA, 20 nt, Artificial Sequence
  RPE65 RNA guide
uauccaugcagacacacugg

SEQ ID NO: 33774 - RNA, 20 nt, Artificial Sequence
  RPE65 RNA guide
uauuaaaccauuggccaucu

SEQ ID NO: 33775 - RNA, 20 nt, Artificial Sequence
  RPE65 RNA guide
uauucaacagacaugacuug

SEQ ID NO: 33776 - RNA, 20 nt, Artificial Sequence
  RPE65 RNA guide
uauuccaugauaauguuccc

SEQ ID NO: 33777 - RNA, 20 nt, Artificial Sequence
  RPE65 RNA guide
ucaaaguagggccuagcuug

SEQ ID NO: 33778 - RNA, 20 nt, Artificial Sequence
  RPE65 RNA guide
ucaacagacaugacuugccu

SEQ ID NO: 33779 - RNA, 20 nt, Artificial Sequence
  RPE65 RNA guide
ucaacaucuugccaagguua

SEQ ID NO: 33780 - RNA, 20 nt, Artificial Sequence
  RPE65 RNA guide
ucaagauggccaaugguuua

SEQ ID NO: 33781 - RNA, 20 nt, Artificial Sequence
  RPE65 RNA guide
ucacaauguaccugggccag

SEQ ID NO: 33782 - RNA, 20 nt, Artificial Sequence
  RPE65 RNA guide
ucacaugggaggaggagcca

SEQ ID NO: 33783 - RNA, 20 nt, Artificial Sequence
  RPE65 RNA guide
ucaccucugaacucaggagg

SEQ ID NO: 33784 - RNA, 20 nt, Artificial Sequence
  RPE65 RNA guide
ucagaggugaaaacucacau

SEQ ID NO: 33785 - RNA, 20 nt, Artificial Sequence
  RPE65 RNA guide
ucaggaggcaaccuauauac

SEQ ID NO: 33786 - RNA, 20 nt, Artificial Sequence
  RPE65 RNA guide
ucauggaauaaaggagaagc

SEQ ID NO: 33787 - RNA, 20 nt, Artificial Sequence
  RPE65 RNA guide
ucaugucuguugaauacagg

SEQ ID NO: 33788 - RNA, 20 nt, Artificial Sequence
  RPE65 RNA guide
ucauguuggaccccaaagcc

SEQ ID NO: 33789 - RNA, 20 nt, Artificial Sequence
  RPE65 RNA guide
ucauuacaagcauuaaauga

SEQ ID NO: 33790 - RNA, 20 nt, Artificial Sequence
  RPE65 RNA guide
uccaacaugaguggcuuuaa

SEQ ID NO: 33791 - RNA, 20 nt, Artificial Sequence
  RPE65 RNA guide
uccaugauaauguucccucg

SEQ ID NO: 33792 - RNA, 20 nt, Artificial Sequence
  RPE65 RNA guide
uccaugcagacacacuggcc

SEQ ID NO: 33793 - RNA, 20 nt, Artificial Sequence
  RPE65 RNA guide
uccaugccacuccuccuccu

SEQ ID NO: 33794 - RNA, 20 nt, Artificial Sequence
  RPE65 RNA guide
ucccaguggccuuuccaauu

SEQ ID NO: 33795 - RNA, 20 nt, Artificial Sequence
  RPE65 RNA guide
ucccaugugaguuuucaccu

SEQ ID NO: 33796 - RNA, 20 nt, Artificial Sequence
  RPE65 RNA guide
ucccucguauccaugcagac

SEQ ID NO: 33797 - RNA, 20 nt, Artificial Sequence
  RPE65 RNA guide
uccuaggcaagucaugucug

SEQ ID NO: 33798 - RNA, 20 nt, Artificial Sequence
  RPE65 RNA guide
uccucaaaguagggccuagc

SEQ ID NO: 33799 - RNA, 20 nt, Artificial Sequence
  RPE65 RNA guide
uccucccaugugaguuuuca

SEQ ID NO: 33800 - RNA, 20 nt, Artificial Sequence
  RPE65 RNA guide
uccuccucaaaguagggccu

SEQ ID NO: 33801 - RNA, 20 nt, Artificial Sequence
  RPE65 RNA guide
uccuccucccaugugaguuu

SEQ ID NO: 33802 - RNA, 20 nt, Artificial Sequence
  RPE65 RNA guide
uccuccuccucaaaguaggg

SEQ ID NO: 33803 - RNA, 20 nt, Artificial Sequence
  RPE65 RNA guide
uccugaguucagaggugaaa

SEQ ID NO: 33804 - RNA, 20 nt, Artificial Sequence
  RPE65 RNA guide
uccuuuauuccaugauaaug

SEQ ID NO: 33805 - RNA, 20 nt, Artificial Sequence
  RPE65 RNA guide
ucguauccaugcagacacac

SEQ ID NO: 33806 - RNA, 20 nt, Artificial Sequence
  RPE65 RNA guide
ucucacaauguaccugggcc

SEQ ID NO: 33807 - RNA, 20 nt, Artificial Sequence
  RPE65 RNA guide
ucugaacucaggaggcaacc

SEQ ID NO: 33808 - RNA, 20 nt, Artificial Sequence
  RPE65 RNA guide
ucugcauggauacgagggaa

SEQ ID NO: 33809 - RNA, 20 nt, Artificial Sequence
  RPE65 RNA guide
ucuguugaauacaggguuua

SEQ ID NO: 33810 - RNA, 20 nt, Artificial Sequence
  RPE65 RNA guide
ucuucucacaauguaccugg

SEQ ID NO: 33811 - RNA, 20 nt, Artificial Sequence
  RPE65 RNA guide
ucuugccaagguuacccucc

SEQ ID NO: 33812 - RNA, 20 nt, Artificial Sequence
  RPE65 RNA guide
ugaaaacucacaugggagga

SEQ ID NO: 33813 - RNA, 20 nt, Artificial Sequence
  RPE65 RNA guide
ugaacucaggaggcaaccua

SEQ ID NO: 33814 - RNA, 20 nt, Artificial Sequence
  RPE65 RNA guide
ugaauacaggguuuaaagcc

SEQ ID NO: 33815 - RNA, 20 nt, Artificial Sequence
  RPE65 RNA guide
ugaccuccaauucuugguuu

SEQ ID NO: 33816 - RNA, 20 nt, Artificial Sequence
  RPE65 RNA guide
ugacuugccuaggaggguaa

SEQ ID NO: 33817 - RNA, 20 nt, Artificial Sequence
  RPE65 RNA guide
ugagaagaaaguggguauau

SEQ ID NO: 33818 - RNA, 20 nt, Artificial Sequence
  RPE65 RNA guide
ugaggaggaggaguggcaug

SEQ ID NO: 33819 - RNA, 20 nt, Artificial Sequence
  RPE65 RNA guide
ugaguggcuuuaaacccugu

SEQ ID NO: 33820 - RNA, 20 nt, Artificial Sequence
  RPE65 RNA guide
ugaguucagaggugaaaacu

SEQ ID NO: 33821 - RNA, 20 nt, Artificial Sequence
  RPE65 RNA guide
ugaguuuucaccucugaacu

SEQ ID NO: 33822 - RNA, 20 nt, Artificial Sequence
  RPE65 RNA guide
ugauaauguucccucguauc

SEQ ID NO: 33823 - RNA, 20 nt, Artificial Sequence
  RPE65 RNA guide
ugcagacacacuggcccagg

SEQ ID NO: 33824 - RNA, 20 nt, Artificial Sequence
  RPE65 RNA guide
ugcauggauacgagggaaca

SEQ ID NO: 33825 - RNA, 20 nt, Artificial Sequence
  RPE65 RNA guide
ugccaagguuacccuccuag

SEQ ID NO: 33826 - RNA, 20 nt, Artificial Sequence
  RPE65 RNA guide
ugccacuccuccuccucaaa

SEQ ID NO: 33827 - RNA, 20 nt, Artificial Sequence
  RPE65 RNA guide
ugccuaggaggguaaccuug

SEQ ID NO: 33828 - RNA, 20 nt, Artificial Sequence
  RPE65 RNA guide
ugccuccugaguucagaggu

SEQ ID NO: 33829 - RNA, 20 nt, Artificial Sequence
  RPE65 RNA guide
ugcgcucucauuuaaugcuu

SEQ ID NO: 33830 - RNA, 20 nt, Artificial Sequence
  RPE65 RNA guide
ugcuagacacugcgcucuca

SEQ ID NO: 33831 - RNA, 20 nt, Artificial Sequence
  RPE65 RNA guide
uggaaaggccacugggaaag

SEQ ID NO: 33832 - RNA, 20 nt, Artificial Sequence
  RPE65 RNA guide
uggaauaaaggagaagcuaa

SEQ ID NO: 33833 - RNA, 20 nt, Artificial Sequence
  RPE65 RNA guide
uggaccccaaagcccuaggc

SEQ ID NO: 33834 - RNA, 20 nt, Artificial Sequence
  RPE65 RNA guide
uggaggucaacaucuugcca

SEQ ID NO: 33835 - RNA, 20 nt, Artificial Sequence
  RPE65 RNA guide
uggauacgagggaacauuau

SEQ ID NO: 33836 - RNA, 20 nt, Artificial Sequence
  RPE65 RNA guide
uggcaagauguugaccucca

SEQ ID NO: 33837 - RNA, 20 nt, Artificial Sequence
  RPE65 RNA guide
uggccaucuugauuccuuuu

SEQ ID NO: 33838 - RNA, 20 nt, Artificial Sequence
  RPE65 RNA guide
uggcccagguacauugugag

SEQ ID NO: 33839 - RNA, 20 nt, Artificial Sequence
  RPE65 RNA guide
uggcuccuccucccauguga

SEQ ID NO: 33840 - RNA, 20 nt, Artificial Sequence
  RPE65 RNA guide
uggcuuuaaacccuguauuc

SEQ ID NO: 33841 - RNA, 20 nt, Artificial Sequence
  RPE65 RNA guide
ugggagaaauaauagaaucu

SEQ ID NO: 33842 - RNA, 20 nt, Artificial Sequence
  RPE65 RNA guide
ugggaggaggagccaagcua

SEQ ID NO: 33843 - RNA, 20 nt, Artificial Sequence
  RPE65 RNA guide
ugggccagugugucugcaug

SEQ ID NO: 33844 - RNA, 20 nt, Artificial Sequence
  RPE65 RNA guide
ugggguccaacaugaguggc

SEQ ID NO: 33845 - RNA, 20 nt, Artificial Sequence
  RPE65 RNA guide
uggguauauagguugccucc

SEQ ID NO: 33846 - RNA, 20 nt, Artificial Sequence
  RPE65 RNA guide
uguaccugggccaguguguc

SEQ ID NO: 33847 - RNA, 20 nt, Artificial Sequence
  RPE65 RNA guide
uguauucaacagacaugacu

SEQ ID NO: 33848 - RNA, 20 nt, Artificial Sequence
  RPE65 RNA guide
ugucugcauggauacgaggg

SEQ ID NO: 33849 - RNA, 20 nt, Artificial Sequence
  RPE65 RNA guide
ugucuguugaauacaggguu

SEQ ID NO: 33850 - RNA, 20 nt, Artificial Sequence
  RPE65 RNA guide
ugugagaagaaaguggguau

SEQ ID NO: 33851 - RNA, 20 nt, Artificial Sequence
  RPE65 RNA guide
ugugaguuuucaccucugaa

SEQ ID NO: 33852 - RNA, 20 nt, Artificial Sequence
  RPE65 RNA guide
ugugucugcauggauacgag

SEQ ID NO: 33853 - RNA, 20 nt, Artificial Sequence
  RPE65 RNA guide
uguucccucguauccaugca

SEQ ID NO: 33854 - RNA, 20 nt, Artificial Sequence
  RPE65 RNA guide
uguugaauacaggguuuaaa

SEQ ID NO: 33855 - RNA, 20 nt, Artificial Sequence
  RPE65 RNA guide
uguugaccuccaauucuugg

SEQ ID NO: 33856 - RNA, 20 nt, Artificial Sequence
  RPE65 RNA guide
uguuggaccccaaagcccua

SEQ ID NO: 33857 - RNA, 20 nt, Artificial Sequence
  RPE65 RNA guide
uuaaaccauuggccaucuug

SEQ ID NO: 33858 - RNA, 20 nt, Artificial Sequence
  RPE65 RNA guide
uuaaacccuguauucaacag

SEQ ID NO: 33859 - RNA, 20 nt, Artificial Sequence
  RPE65 RNA guide
uuaaagccacucauguugga

SEQ ID NO: 33860 - RNA, 20 nt, Artificial Sequence
  RPE65 RNA guide
uuaaaugagagcgcaguguc

SEQ ID NO: 33861 - RNA, 20 nt, Artificial Sequence
  RPE65 RNA guide
uuacaagcauuaaaugagag

SEQ ID NO: 33862 - RNA, 20 nt, Artificial Sequence
  RPE65 RNA guide
uuacccuccuaggcaaguca

SEQ ID NO: 33863 - RNA, 20 nt, Artificial Sequence
  RPE65 RNA guide
uuagcuucuccuuuauucca

SEQ ID NO: 33864 - RNA, 20 nt, Artificial Sequence
  RPE65 RNA guide
uuauaaaaccaagaauugga

SEQ ID NO: 33865 - RNA, 20 nt, Artificial Sequence
  RPE65 RNA guide
uuauaaaauuggaaaggcca

SEQ ID NO: 33866 - RNA, 20 nt, Artificial Sequence
  RPE65 RNA guide
uuaucauggaauaaaggaga

SEQ ID NO: 33867 - RNA, 20 nt, Artificial Sequence
  RPE65 RNA guide
uuauuaaaccauuggccauc

SEQ ID NO: 33868 - RNA, 20 nt, Artificial Sequence
  RPE65 RNA guide
uuauuccaugauaauguucc

SEQ ID NO: 33869 - RNA, 20 nt, Artificial Sequence
  RPE65 RNA guide
uucaacagacaugacuugcc

SEQ ID NO: 33870 - RNA, 20 nt, Artificial Sequence
  RPE65 RNA guide
uucaccucugaacucaggag

SEQ ID NO: 33871 - RNA, 20 nt, Artificial Sequence
  RPE65 RNA guide
uucagaggugaaaacucaca

SEQ ID NO: 33872 - RNA, 20 nt, Artificial Sequence
  RPE65 RNA guide
uuccaugauaauguucccuc

SEQ ID NO: 33873 - RNA, 20 nt, Artificial Sequence
  RPE65 RNA guide
uucccaguggccuuuccaau

SEQ ID NO: 33874 - RNA, 20 nt, Artificial Sequence
  RPE65 RNA guide
uucccucguauccaugcaga

SEQ ID NO: 33875 - RNA, 20 nt, Artificial Sequence
  RPE65 RNA guide
uucucacaauguaccugggc

SEQ ID NO: 33876 - RNA, 20 nt, Artificial Sequence
  RPE65 RNA guide
uucuucucacaauguaccug

SEQ ID NO: 33877 - RNA, 20 nt, Artificial Sequence
  RPE65 RNA guide
uugaauacaggguuuaaagc

SEQ ID NO: 33878 - RNA, 20 nt, Artificial Sequence
  RPE65 RNA guide
uugaccuccaauucuugguu

SEQ ID NO: 33879 - RNA, 20 nt, Artificial Sequence
  RPE65 RNA guide
uugaggaggaggaguggcau

SEQ ID NO: 33880 - RNA, 20 nt, Artificial Sequence
  RPE65 RNA guide
uugccaagguuacccuccua

SEQ ID NO: 33881 - RNA, 20 nt, Artificial Sequence
  RPE65 RNA guide
uugccuaggaggguaaccuu

SEQ ID NO: 33882 - RNA, 20 nt, Artificial Sequence
  RPE65 RNA guide
uugccuccugaguucagagg

SEQ ID NO: 33883 - RNA, 20 nt, Artificial Sequence
  RPE65 RNA guide
uuggaaaggccacugggaaa

SEQ ID NO: 33884 - RNA, 20 nt, Artificial Sequence
  RPE65 RNA guide
uuggaccccaaagcccuagg

SEQ ID NO: 33885 - RNA, 20 nt, Artificial Sequence
  RPE65 RNA guide
uuggaggucaacaucuugcc

SEQ ID NO: 33886 - RNA, 20 nt, Artificial Sequence
  RPE65 RNA guide
uuggcaagauguugaccucc

SEQ ID NO: 33887 - RNA, 20 nt, Artificial Sequence
  RPE65 RNA guide
uuggccaucuugauuccuuu

SEQ ID NO: 33888 - RNA, 20 nt, Artificial Sequence
  RPE65 RNA guide
uuggcuccuccucccaugug

SEQ ID NO: 33889 - RNA, 20 nt, Artificial Sequence
  RPE65 RNA guide
uugggguccaacaugagugg

SEQ ID NO: 33890 - RNA, 20 nt, Artificial Sequence
  RPE65 RNA guide
uugugagaagaaagugggua

SEQ ID NO: 33891 - RNA, 20 nt, Artificial Sequence
  RPE65 RNA guide
uuuaaacccuguauucaaca

SEQ ID NO: 33892 - RNA, 20 nt, Artificial Sequence
  RPE65 RNA guide
uuuaaagccacucauguugg

SEQ ID NO: 33893 - RNA, 20 nt, Artificial Sequence
  RPE65 RNA guide
uuuagcuucuccuuuauucc

SEQ ID NO: 33894 - RNA, 20 nt, Artificial Sequence
  RPE65 RNA guide
uuuauaaaauuggaaaggcc

SEQ ID NO: 33895 - RNA, 20 nt, Artificial Sequence
  RPE65 RNA guide
uuuauuccaugauaauguuc

SEQ ID NO: 33896 - RNA, 20 nt, Artificial Sequence
  RPE65 RNA guide
uuucaccucugaacucagga

SEQ ID NO: 33897 - RNA, 20 nt, Artificial Sequence
  RPE65 RNA guide
uuucccaguggccuuuccaa

SEQ ID NO: 33898 - RNA, 20 nt, Artificial Sequence
  RPE65 RNA guide
uuucuucucacaauguaccu

SEQ ID NO: 33899 - RNA, 20 nt, Artificial Sequence
  RPE65 RNA guide
uuugaggaggaggaguggca

SEQ ID NO: 33900 - RNA, 20 nt, Artificial Sequence
  RPE65 RNA guide
uuugggguccaacaugagug

SEQ ID NO: 33901 - RNA, 20 nt, Artificial Sequence
  RPE65 RNA guide
uuuucaccucugaacucagg

SEQ ID NO: 33902 - RNA, 21 nt, Artificial Sequence
  RPE65 RNA guide
aaaaagaaaaaggaaucaaga

SEQ ID NO: 33903 - RNA, 21 nt, Artificial Sequence
  RPE65 RNA guide
aaaaaggaaucaagauggcca

SEQ ID NO: 33904 - RNA, 21 nt, Artificial Sequence
  RPE65 RNA guide
aaaaccaagaauuggagguca

SEQ ID NO: 33905 - RNA, 21 nt, Artificial Sequence
  RPE65 RNA guide
aaaacucacaugggaggagga

SEQ ID NO: 33906 - RNA, 21 nt, Artificial Sequence
  RPE65 RNA guide
aaaagaaaaaggaaucaagau

SEQ ID NO: 33907 - RNA, 21 nt, Artificial Sequence
  RPE65 RNA guide
aaaaggaaucaagauggccaa

SEQ ID NO: 33908 - RNA, 21 nt, Artificial Sequence
  RPE65 RNA guide
aaaauuggaaaggccacuggg

SEQ ID NO: 33909 - RNA, 21 nt, Artificial Sequence
  RPE65 RNA guide
aaaccaagaauuggaggucaa

SEQ ID NO: 33910 - RNA, 21 nt, Artificial Sequence
  RPE65 RNA guide
aaaccauuggccaucuugauu

SEQ ID NO: 33911 - RNA, 21 nt, Artificial Sequence
  RPE65 RNA guide
aaacccuguauucaacagaca

SEQ ID NO: 33912 - RNA, 21 nt, Artificial Sequence
  RPE65 RNA guide
aaacucacaugggaggaggag

SEQ ID NO: 33913 - RNA, 21 nt, Artificial Sequence
  RPE65 RNA guide
aaagaaaaaggaaucaagaug

SEQ ID NO: 33914 - RNA, 21 nt, Artificial Sequence
  RPE65 RNA guide
aaagcagcacuccaugccacu

SEQ ID NO: 33915 - RNA, 21 nt, Artificial Sequence
  RPE65 RNA guide
aaagccacucauguuggaccc

SEQ ID NO: 33916 - RNA, 21 nt, Artificial Sequence
  RPE65 RNA guide
aaagcccuaggcuuuagcuuc

SEQ ID NO: 33917 - RNA, 21 nt, Artificial Sequence
  RPE65 RNA guide
aaagccuagggcuuugggguc

SEQ ID NO: 33918 - RNA, 21 nt, Artificial Sequence
  RPE65 RNA guide
aaaggaaucaagauggccaau

SEQ ID NO: 33919 - RNA, 21 nt, Artificial Sequence
  RPE65 RNA guide
aaaggagaagcuaaagccuag

SEQ ID NO: 33920 - RNA, 21 nt, Artificial Sequence
  RPE65 RNA guide
aaaggccacugggaaaggggu

SEQ ID NO: 33921 - RNA, 21 nt, Artificial Sequence
  RPE65 RNA guide
aaaguagggccuagcuuggcu

SEQ ID NO: 33922 - RNA, 21 nt, Artificial Sequence
  RPE65 RNA guide
aaaguggguauauagguugcc

SEQ ID NO: 33923 - RNA, 21 nt, Artificial Sequence
  RPE65 RNA guide
aaauuggaaaggccacuggga

SEQ ID NO: 33924 - RNA, 21 nt, Artificial Sequence
  RPE65 RNA guide
aacagacaugacuugccuagg

SEQ ID NO: 33925 - RNA, 21 nt, Artificial Sequence
  RPE65 RNA guide
aacaucuugccaagguuaccc

SEQ ID NO: 33926 - RNA, 21 nt, Artificial Sequence
  RPE65 RNA guide
aacaugaguggcuuuaaaccc

SEQ ID NO: 33927 - RNA, 21 nt, Artificial Sequence
  RPE65 RNA guide
aaccaagaauuggaggucaac

SEQ ID NO: 33928 - RNA, 21 nt, Artificial Sequence
  RPE65 RNA guide
aaccauuggccaucuugauuc

SEQ ID NO: 33929 - RNA, 21 nt, Artificial Sequence
  RPE65 RNA guide
aacccuguauucaacagacau

SEQ ID NO: 33930 - RNA, 21 nt, Artificial Sequence
  RPE65 RNA guide
aaccuauauacccacuuucuu

SEQ ID NO: 33931 - RNA, 21 nt, Artificial Sequence
  RPE65 RNA guide
aaccuuggcaagauguugacc

SEQ ID NO: 33932 - RNA, 21 nt, Artificial Sequence
  RPE65 RNA guide
aacucacaugggaggaggagc

SEQ ID NO: 33933 - RNA, 21 nt, Artificial Sequence
  RPE65 RNA guide
aacucaggaggcaaccuauau

SEQ ID NO: 33934 - RNA, 21 nt, Artificial Sequence
  RPE65 RNA guide
aagaaaaaggaaucaagaugg

SEQ ID NO: 33935 - RNA, 21 nt, Artificial Sequence
  RPE65 RNA guide
aagaaaguggguauauagguu

SEQ ID NO: 33936 - RNA, 21 nt, Artificial Sequence
  RPE65 RNA guide
aagaauuggaggucaacaucu

SEQ ID NO: 33937 - RNA, 21 nt, Artificial Sequence
  RPE65 RNA guide
aagauguugaccuccaauucu

SEQ ID NO: 33938 - RNA, 21 nt, Artificial Sequence
  RPE65 RNA guide
aagcagcacuccaugccacuc

SEQ ID NO: 33939 - RNA, 21 nt, Artificial Sequence
  RPE65 RNA guide
aagcauuaaaugagagcgcag

SEQ ID NO: 33940 - RNA, 21 nt, Artificial Sequence
  RPE65 RNA guide
aagccacucauguuggacccc

SEQ ID NO: 33941 - RNA, 21 nt, Artificial Sequence
  RPE65 RNA guide
aagcccuaggcuuuagcuucu

SEQ ID NO: 33942 - RNA, 21 nt, Artificial Sequence
  RPE65 RNA guide
aagccuagggcuuuggggucc

SEQ ID NO: 33943 - RNA, 21 nt, Artificial Sequence
  RPE65 RNA guide
aagcuaaagccuagggcuuug

SEQ ID NO: 33944 - RNA, 21 nt, Artificial Sequence
  RPE65 RNA guide
aagcuaggcccuacuuugagg

SEQ ID NO: 33945 - RNA, 21 nt, Artificial Sequence
  RPE65 RNA guide
aaggaaucaagauggccaaug

SEQ ID NO: 33946 - RNA, 21 nt, Artificial Sequence
  RPE65 RNA guide
aaggagaagcuaaagccuagg

SEQ ID NO: 33947 - RNA, 21 nt, Artificial Sequence
  RPE65 RNA guide
aagguagauucuauuauuucu

SEQ ID NO: 33948 - RNA, 21 nt, Artificial Sequence
  RPE65 RNA guide
aagguuacccuccuaggcaag

SEQ ID NO: 33949 - RNA, 21 nt, Artificial Sequence
  RPE65 RNA guide
aaguagggccuagcuuggcuc

SEQ ID NO: 33950 - RNA, 21 nt, Artificial Sequence
  RPE65 RNA guide
aagucaugucuguugaauaca

SEQ ID NO: 33951 - RNA, 21 nt, Artificial Sequence
  RPE65 RNA guide
aaguggguauauagguugccu

SEQ ID NO: 33952 - RNA, 21 nt, Artificial Sequence
  RPE65 RNA guide
aauaaaggagaagcuaaagcc

SEQ ID NO: 33953 - RNA, 21 nt, Artificial Sequence
  RPE65 RNA guide
aauacaggguuuaaagccacu

SEQ ID NO: 33954 - RNA, 21 nt, Artificial Sequence
  RPE65 RNA guide
aaucaagauggccaaugguuu

SEQ ID NO: 33955 - RNA, 21 nt, Artificial Sequence
  RPE65 RNA guide
aaugggagaaauaauagaauc

SEQ ID NO: 33956 - RNA, 21 nt, Artificial Sequence
  RPE65 RNA guide
aauguaccugggccagugugu

SEQ ID NO: 33957 - RNA, 21 nt, Artificial Sequence
  RPE65 RNA guide
aauguucccucguauccaugc

SEQ ID NO: 33958 - RNA, 21 nt, Artificial Sequence
  RPE65 RNA guide
aauuggaaaggccacugggaa

SEQ ID NO: 33959 - RNA, 21 nt, Artificial Sequence
  RPE65 RNA guide
aauuggaggucaacaucuugc

SEQ ID NO: 33960 - RNA, 21 nt, Artificial Sequence
  RPE65 RNA guide
acaagcauuaaaugagagcgc

SEQ ID NO: 33961 - RNA, 21 nt, Artificial Sequence
  RPE65 RNA guide
acaauguaccugggccagugu

SEQ ID NO: 33962 - RNA, 21 nt, Artificial Sequence
  RPE65 RNA guide
acacaaagcacuucauaauaa

SEQ ID NO: 33963 - RNA, 21 nt, Artificial Sequence
  RPE65 RNA guide
acacacuggcccagguacauu

SEQ ID NO: 33964 - RNA, 21 nt, Artificial Sequence
  RPE65 RNA guide
acacugcgcucucauuuaaug

SEQ ID NO: 33965 - RNA, 21 nt, Artificial Sequence
  RPE65 RNA guide
acacuggcccagguacauugu

SEQ ID NO: 33966 - RNA, 21 nt, Artificial Sequence
  RPE65 RNA guide
acagacaugacuugccuagga

SEQ ID NO: 33967 - RNA, 21 nt, Artificial Sequence
  RPE65 RNA guide
acaggguuuaaagccacucau

SEQ ID NO: 33968 - RNA, 21 nt, Artificial Sequence
  RPE65 RNA guide
acaucuugccaagguuacccu

SEQ ID NO: 33969 - RNA, 21 nt, Artificial Sequence
  RPE65 RNA guide
acaugacuugccuaggagggu

SEQ ID NO: 33970 - RNA, 21 nt, Artificial Sequence
  RPE65 RNA guide
acaugaguggcuuuaaacccu

SEQ ID NO: 33971 - RNA, 21 nt, Artificial Sequence
  RPE65 RNA guide
acaugggaggaggagccaagc

SEQ ID NO: 33972 - RNA, 21 nt, Artificial Sequence
  RPE65 RNA guide
acauuaucauggaauaaagga

SEQ ID NO: 33973 - RNA, 21 nt, Artificial Sequence
  RPE65 RNA guide
acauugugagaagaaaguggg

SEQ ID NO: 33974 - RNA, 21 nt, Artificial Sequence
  RPE65 RNA guide
accaagaauuggaggucaaca

SEQ ID NO: 33975 - RNA, 21 nt, Artificial Sequence
  RPE65 RNA guide
accauuggccaucuugauucc

SEQ ID NO: 33976 - RNA, 21 nt, Artificial Sequence
  RPE65 RNA guide
acccacuuucuucucacaaug

SEQ ID NO: 33977 - RNA, 21 nt, Artificial Sequence
  RPE65 RNA guide
accccaaagcccuaggcuuua

SEQ ID NO: 33978 - RNA, 21 nt, Artificial Sequence
  RPE65 RNA guide
accccuuucccaguggccuuu

SEQ ID NO: 33979 - RNA, 21 nt, Artificial Sequence
  RPE65 RNA guide
acccuccuaggcaagucaugu

SEQ ID NO: 33980 - RNA, 21 nt, Artificial Sequence
  RPE65 RNA guide
acccuguauucaacagacaug

SEQ ID NO: 33981 - RNA, 21 nt, Artificial Sequence
  RPE65 RNA guide
accuauauacccacuuucuuc

SEQ ID NO: 33982 - RNA, 21 nt, Artificial Sequence
  RPE65 RNA guide
accucugaacucaggaggcaa

SEQ ID NO: 33983 - RNA, 21 nt, Artificial Sequence
  RPE65 RNA guide
accugggccagugugucugca

SEQ ID NO: 33984 - RNA, 21 nt, Artificial Sequence
  RPE65 RNA guide
accuuggcaagauguugaccu

SEQ ID NO: 33985 - RNA, 21 nt, Artificial Sequence
  RPE65 RNA guide
acgagggaacauuaucaugga

SEQ ID NO: 33986 - RNA, 21 nt, Artificial Sequence
  RPE65 RNA guide
acucacaugggaggaggagcc

SEQ ID NO: 33987 - RNA, 21 nt, Artificial Sequence
  RPE65 RNA guide
acucaggaggcaaccuauaua

SEQ ID NO: 33988 - RNA, 21 nt, Artificial Sequence
  RPE65 RNA guide
acucauguuggaccccaaagc

SEQ ID NO: 33989 - RNA, 21 nt, Artificial Sequence
  RPE65 RNA guide
acuccaugccacuccuccucc

SEQ ID NO: 33990 - RNA, 21 nt, Artificial Sequence
  RPE65 RNA guide
acuccuccuccucaaaguagg

SEQ ID NO: 33991 - RNA, 21 nt, Artificial Sequence
  RPE65 RNA guide
acugcgcucucauuuaaugcu

SEQ ID NO: 33992 - RNA, 21 nt, Artificial Sequence
  RPE65 RNA guide
acuggcccagguacauuguga

SEQ ID NO: 33993 - RNA, 21 nt, Artificial Sequence
  RPE65 RNA guide
acuugccuaggaggguaaccu

SEQ ID NO: 33994 - RNA, 21 nt, Artificial Sequence
  RPE65 RNA guide
acuuucuucucacaauguacc

SEQ ID NO: 33995 - RNA, 21 nt, Artificial Sequence
  RPE65 RNA guide
acuuugaggaggaggaguggc

SEQ ID NO: 33996 - RNA, 21 nt, Artificial Sequence
  RPE65 RNA guide
agaaaaaggaaucaagauggc

SEQ ID NO: 33997 - RNA, 21 nt, Artificial Sequence
  RPE65 RNA guide
agaaaguggguauauagguug

SEQ ID NO: 33998 - RNA, 21 nt, Artificial Sequence
  RPE65 RNA guide
agaagaaaguggguauauagg

SEQ ID NO: 33999 - RNA, 21 nt, Artificial Sequence
  RPE65 RNA guide
agaagcuaaagccuagggcuu

SEQ ID NO: 34000 - RNA, 21 nt, Artificial Sequence
  RPE65 RNA guide
agaauuggaggucaacaucuu

SEQ ID NO: 34001 - RNA, 21 nt, Artificial Sequence
  RPE65 RNA guide
agacacacuggcccagguaca

SEQ ID NO: 34002 - RNA, 21 nt, Artificial Sequence
  RPE65 RNA guide
agacacugcgcucucauuuaa

SEQ ID NO: 34003 - RNA, 21 nt, Artificial Sequence
  RPE65 RNA guide
agacaugacuugccuaggagg

SEQ ID NO: 34004 - RNA, 21 nt, Artificial Sequence
  RPE65 RNA guide
agaggugaaaacucacauggg

SEQ ID NO: 34005 - RNA, 21 nt, Artificial Sequence
  RPE65 RNA guide
agauguugaccuccaauucuu

SEQ ID NO: 34006 - RNA, 21 nt, Artificial Sequence
  RPE65 RNA guide
agcacuccaugccacuccucc

SEQ ID NO: 34007 - RNA, 21 nt, Artificial Sequence
  RPE65 RNA guide
agcagcacuccaugccacucc

SEQ ID NO: 34008 - RNA, 21 nt, Artificial Sequence
  RPE65 RNA guide
agcauuaaaugagagcgcagu

SEQ ID NO: 34009 - RNA, 21 nt, Artificial Sequence
  RPE65 RNA guide
agccaagcuaggcccuacuuu

SEQ ID NO: 34010 - RNA, 21 nt, Artificial Sequence
  RPE65 RNA guide
agccacucauguuggacccca

SEQ ID NO: 34011 - RNA, 21 nt, Artificial Sequence
  RPE65 RNA guide
agcccuaggcuuuagcuucuc

SEQ ID NO: 34012 - RNA, 21 nt, Artificial Sequence
  RPE65 RNA guide
agccuagggcuuuggggucca

SEQ ID NO: 34013 - RNA, 21 nt, Artificial Sequence
  RPE65 RNA guide
agcuaaagccuagggcuuugg

SEQ ID NO: 34014 - RNA, 21 nt, Artificial Sequence
  RPE65 RNA guide
agcuaggcccuacuuugagga

SEQ ID NO: 34015 - RNA, 21 nt, Artificial Sequence
  RPE65 RNA guide
agcuauuauuaugaagugcuu

SEQ ID NO: 34016 - RNA, 21 nt, Artificial Sequence
  RPE65 RNA guide
agcuucuccuuuauuccauga

SEQ ID NO: 34017 - RNA, 21 nt, Artificial Sequence
  RPE65 RNA guide
agcuuggcuccuccucccaug

SEQ ID NO: 34018 - RNA, 21 nt, Artificial Sequence
  RPE65 RNA guide
aggaaucaagauggccaaugg

SEQ ID NO: 34019 - RNA, 21 nt, Artificial Sequence
  RPE65 RNA guide
aggagaagcuaaagccuaggg

SEQ ID NO: 34020 - RNA, 21 nt, Artificial Sequence
  RPE65 RNA guide
aggagccaagcuaggcccuac

SEQ ID NO: 34021 - RNA, 21 nt, Artificial Sequence
  RPE65 RNA guide
aggaggagccaagcuaggccc

SEQ ID NO: 34022 - RNA, 21 nt, Artificial Sequence
  RPE65 RNA guide
aggaggaggaguggcauggag

SEQ ID NO: 34023 - RNA, 21 nt, Artificial Sequence
  RPE65 RNA guide
aggaggaguggcauggagugc

SEQ ID NO: 34024 - RNA, 21 nt, Artificial Sequence
  RPE65 RNA guide
aggaggcaaccuauauaccca

SEQ ID NO: 34025 - RNA, 21 nt, Artificial Sequence
  RPE65 RNA guide
aggaggguaaccuuggcaaga

SEQ ID NO: 34026 - RNA, 21 nt, Artificial Sequence
  RPE65 RNA guide
aggaguggcauggagugcugc

SEQ ID NO: 34027 - RNA, 21 nt, Artificial Sequence
  RPE65 RNA guide
aggcaaccuauauacccacuu

SEQ ID NO: 34028 - RNA, 21 nt, Artificial Sequence
  RPE65 RNA guide
aggcaagucaugucuguugaa

SEQ ID NO: 34029 - RNA, 21 nt, Artificial Sequence
  RPE65 RNA guide
aggcccuacuuugaggaggag

SEQ ID NO: 34030 - RNA, 21 nt, Artificial Sequence
  RPE65 RNA guide
aggcuuuagcuucuccuuuau

SEQ ID NO: 34031 - RNA, 21 nt, Artificial Sequence
  RPE65 RNA guide
agggaacauuaucauggaaua

SEQ ID NO: 34032 - RNA, 21 nt, Artificial Sequence
  RPE65 RNA guide
agggccuagcuuggcuccucc

SEQ ID NO: 34033 - RNA, 21 nt, Artificial Sequence
  RPE65 RNA guide
agggcuuugggguccaacaug

SEQ ID NO: 34034 - RNA, 21 nt, Artificial Sequence
  RPE65 RNA guide
aggguaaccuuggcaagaugu

SEQ ID NO: 34035 - RNA, 21 nt, Artificial Sequence
  RPE65 RNA guide
aggguuuaaagccacucaugu

SEQ ID NO: 34036 - RNA, 21 nt, Artificial Sequence
  RPE65 RNA guide
agguacauugugagaagaaag

SEQ ID NO: 34037 - RNA, 21 nt, Artificial Sequence
  RPE65 RNA guide
agguagauucuauuauuucuc

SEQ ID NO: 34038 - RNA, 21 nt, Artificial Sequence
  RPE65 RNA guide
aggucaacaucuugccaaggu

SEQ ID NO: 34039 - RNA, 21 nt, Artificial Sequence
  RPE65 RNA guide
aggugaaaacucacaugggag

SEQ ID NO: 34040 - RNA, 21 nt, Artificial Sequence
  RPE65 RNA guide
agguuacccuccuaggcaagu

SEQ ID NO: 34041 - RNA, 21 nt, Artificial Sequence
  RPE65 RNA guide
agguugccuccugaguucaga

SEQ ID NO: 34042 - RNA, 21 nt, Artificial Sequence
  RPE65 RNA guide
aguagggccuagcuuggcucc

SEQ ID NO: 34043 - RNA, 21 nt, Artificial Sequence
  RPE65 RNA guide
agucaugucuguugaauacag

SEQ ID NO: 34044 - RNA, 21 nt, Artificial Sequence
  RPE65 RNA guide
aguggcuuuaaacccuguauu

SEQ ID NO: 34045 - RNA, 21 nt, Artificial Sequence
  RPE65 RNA guide
aguggguauauagguugccuc

SEQ ID NO: 34046 - RNA, 21 nt, Artificial Sequence
  RPE65 RNA guide
agugugucugcauggauacga

SEQ ID NO: 34047 - RNA, 21 nt, Artificial Sequence
  RPE65 RNA guide
aguucagaggugaaaacucac

SEQ ID NO: 34048 - RNA, 21 nt, Artificial Sequence
  RPE65 RNA guide
aguuuucaccucugaacucag

SEQ ID NO: 34049 - RNA, 21 nt, Artificial Sequence
  RPE65 RNA guide
auaaaaccaagaauuggaggu

SEQ ID NO: 34050 - RNA, 21 nt, Artificial Sequence
  RPE65 RNA guide
auaaaauuggaaaggccacug

SEQ ID NO: 34051 - RNA, 21 nt, Artificial Sequence
  RPE65 RNA guide
auaaaggagaagcuaaagccu

SEQ ID NO: 34052 - RNA, 21 nt, Artificial Sequence
  RPE65 RNA guide
auaauguucccucguauccau

SEQ ID NO: 34053 - RNA, 21 nt, Artificial Sequence
  RPE65 RNA guide
auacaggguuuaaagccacuc

SEQ ID NO: 34054 - RNA, 21 nt, Artificial Sequence
  RPE65 RNA guide
auacccacuuucuucucacaa

SEQ ID NO: 34055 - RNA, 21 nt, Artificial Sequence
  RPE65 RNA guide
auacgagggaacauuaucaug

SEQ ID NO: 34056 - RNA, 21 nt, Artificial Sequence
  RPE65 RNA guide
auagguugccuccugaguuca

SEQ ID NO: 34057 - RNA, 21 nt, Artificial Sequence
  RPE65 RNA guide
auauacccacuuucuucucac

SEQ ID NO: 34058 - RNA, 21 nt, Artificial Sequence
  RPE65 RNA guide
auauagguugccuccugaguu

SEQ ID NO: 34059 - RNA, 21 nt, Artificial Sequence
  RPE65 RNA guide
aucaagauggccaaugguuua

SEQ ID NO: 34060 - RNA, 21 nt, Artificial Sequence
  RPE65 RNA guide
aucauggaauaaaggagaagc

SEQ ID NO: 34061 - RNA, 21 nt, Artificial Sequence
  RPE65 RNA guide
auccaugcagacacacuggcc

SEQ ID NO: 34062 - RNA, 21 nt, Artificial Sequence
  RPE65 RNA guide
aucuugccaagguuacccucc

SEQ ID NO: 34063 - RNA, 21 nt, Artificial Sequence
  RPE65 RNA guide
augacuugccuaggaggguaa

SEQ ID NO: 34064 - RNA, 21 nt, Artificial Sequence
  RPE65 RNA guide
augaguggcuuuaaacccugu

SEQ ID NO: 34065 - RNA, 21 nt, Artificial Sequence
  RPE65 RNA guide
augauaauguucccucguauc

SEQ ID NO: 34066 - RNA, 21 nt, Artificial Sequence
  RPE65 RNA guide
augcagacacacuggcccagg

SEQ ID NO: 34067 - RNA, 21 nt, Artificial Sequence
  RPE65 RNA guide
augccacuccuccuccucaaa

SEQ ID NO: 34068 - RNA, 21 nt, Artificial Sequence
  RPE65 RNA guide
auggaauaaaggagaagcuaa

SEQ ID NO: 34069 - RNA, 21 nt, Artificial Sequence
  RPE65 RNA guide
auggauacgagggaacauuau

SEQ ID NO: 34070 - RNA, 21 nt, Artificial Sequence
  RPE65 RNA guide
augggagaaauaauagaaucu

SEQ ID NO: 34071 - RNA, 21 nt, Artificial Sequence
  RPE65 RNA guide
augggaggaggagccaagcua

SEQ ID NO: 34072 - RNA, 21 nt, Artificial Sequence
  RPE65 RNA guide
auguaccugggccaguguguc

SEQ ID NO: 34073 - RNA, 21 nt, Artificial Sequence
  RPE65 RNA guide
augucuguugaauacaggguu

SEQ ID NO: 34074 - RNA, 21 nt, Artificial Sequence
  RPE65 RNA guide
augugaguuuucaccucugaa

SEQ ID NO: 34075 - RNA, 21 nt, Artificial Sequence
  RPE65 RNA guide
auguucccucguauccaugca

SEQ ID NO: 34076 - RNA, 21 nt, Artificial Sequence
  RPE65 RNA guide
auguugaccuccaauucuugg

SEQ ID NO: 34077 - RNA, 21 nt, Artificial Sequence
  RPE65 RNA guide
auguuggaccccaaagcccua

SEQ ID NO: 34078 - RNA, 21 nt, Artificial Sequence
  RPE65 RNA guide
auuaaaccauuggccaucuug

SEQ ID NO: 34079 - RNA, 21 nt, Artificial Sequence
  RPE65 RNA guide
auuaaaugagagcgcaguguc

SEQ ID NO: 34080 - RNA, 21 nt, Artificial Sequence
  RPE65 RNA guide
auuacaagcauuaaaugagag

SEQ ID NO: 34081 - RNA, 21 nt, Artificial Sequence
  RPE65 RNA guide
auuauaaaaccaagaauugga

SEQ ID NO: 34082 - RNA, 21 nt, Artificial Sequence
  RPE65 RNA guide
auuaucauggaauaaaggaga

SEQ ID NO: 34083 - RNA, 21 nt, Artificial Sequence
  RPE65 RNA guide
auuauuaaaccauuggccauc

SEQ ID NO: 34084 - RNA, 21 nt, Artificial Sequence
  RPE65 RNA guide
auuauuaugaagugcuuugug

SEQ ID NO: 34085 - RNA, 21 nt, Artificial Sequence
  RPE65 RNA guide
auucaacagacaugacuugcc

SEQ ID NO: 34086 - RNA, 21 nt, Artificial Sequence
  RPE65 RNA guide
auuccaugauaauguucccuc

SEQ ID NO: 34087 - RNA, 21 nt, Artificial Sequence
  RPE65 RNA guide
auuggaaaggccacugggaaa

SEQ ID NO: 34088 - RNA, 21 nt, Artificial Sequence
  RPE65 RNA guide
auuggaggucaacaucuugcc

SEQ ID NO: 34089 - RNA, 21 nt, Artificial Sequence
  RPE65 RNA guide
auuggccaucuugauuccuuu

SEQ ID NO: 34090 - RNA, 21 nt, Artificial Sequence
  RPE65 RNA guide
auugugagaagaaagugggua

SEQ ID NO: 34091 - RNA, 21 nt, Artificial Sequence
  RPE65 RNA guide
caaagcccuaggcuuuagcuu

SEQ ID NO: 34092 - RNA, 21 nt, Artificial Sequence
  RPE65 RNA guide
caaaguagggccuagcuuggc

SEQ ID NO: 34093 - RNA, 21 nt, Artificial Sequence
  RPE65 RNA guide
caacagacaugacuugccuag

SEQ ID NO: 34094 - RNA, 21 nt, Artificial Sequence
  RPE65 RNA guide
caacaucuugccaagguuacc

SEQ ID NO: 34095 - RNA, 21 nt, Artificial Sequence
  RPE65 RNA guide
caacaugaguggcuuuaaacc

SEQ ID NO: 34096 - RNA, 21 nt, Artificial Sequence
  RPE65 RNA guide
caaccuauauacccacuuucu

SEQ ID NO: 34097 - RNA, 21 nt, Artificial Sequence
  RPE65 RNA guide
caagaauuggaggucaacauc

SEQ ID NO: 34098 - RNA, 21 nt, Artificial Sequence
  RPE65 RNA guide
caagauggccaaugguuuaau

SEQ ID NO: 34099 - RNA, 21 nt, Artificial Sequence
  RPE65 RNA guide
caagauguugaccuccaauuc

SEQ ID NO: 34100 - RNA, 21 nt, Artificial Sequence
  RPE65 RNA guide
caagcauuaaaugagagcgca

SEQ ID NO: 34101 - RNA, 21 nt, Artificial Sequence
  RPE65 RNA guide
caagcuaggcccuacuuugag

SEQ ID NO: 34102 - RNA, 21 nt, Artificial Sequence
  RPE65 RNA guide
caagguuacccuccuaggcaa

SEQ ID NO: 34103 - RNA, 21 nt, Artificial Sequence
  RPE65 RNA guide
caagucaugucuguugaauac

SEQ ID NO: 34104 - RNA, 21 nt, Artificial Sequence
  RPE65 RNA guide
caauguaccugggccagugug

SEQ ID NO: 34105 - RNA, 21 nt, Artificial Sequence
  RPE65 RNA guide
cacaaagcacuucauaauaau

SEQ ID NO: 34106 - RNA, 21 nt, Artificial Sequence
  RPE65 RNA guide
cacaauagcuauuauuaugaa

SEQ ID NO: 34107 - RNA, 21 nt, Artificial Sequence
  RPE65 RNA guide
cacaauguaccugggccagug

SEQ ID NO: 34108 - RNA, 21 nt, Artificial Sequence
  RPE65 RNA guide
cacacaaagcacuucauaaua

SEQ ID NO: 34109 - RNA, 21 nt, Artificial Sequence
  RPE65 RNA guide
cacacuggcccagguacauug

SEQ ID NO: 34110 - RNA, 21 nt, Artificial Sequence
  RPE65 RNA guide
cacaugggaggaggagccaag

SEQ ID NO: 34111 - RNA, 21 nt, Artificial Sequence
  RPE65 RNA guide
caccucugaacucaggaggca

SEQ ID NO: 34112 - RNA, 21 nt, Artificial Sequence
  RPE65 RNA guide
cacucauguuggaccccaaag

SEQ ID NO: 34113 - RNA, 21 nt, Artificial Sequence
  RPE65 RNA guide
cacuccaugccacuccuccuc

SEQ ID NO: 34114 - RNA, 21 nt, Artificial Sequence
  RPE65 RNA guide
cacuccuccuccucaaaguag

SEQ ID NO: 34115 - RNA, 21 nt, Artificial Sequence
  RPE65 RNA guide
cacugcgcucucauuuaaugc

SEQ ID NO: 34116 - RNA, 21 nt, Artificial Sequence
  RPE65 RNA guide
cacuggcccagguacauugug

SEQ ID NO: 34117 - RNA, 21 nt, Artificial Sequence
  RPE65 RNA guide
cacuuucuucucacaauguac

SEQ ID NO: 34118 - RNA, 21 nt, Artificial Sequence
  RPE65 RNA guide
cagacacacuggcccagguac

SEQ ID NO: 34119 - RNA, 21 nt, Artificial Sequence
  RPE65 RNA guide
cagacaugacuugccuaggag

SEQ ID NO: 34120 - RNA, 21 nt, Artificial Sequence
  RPE65 RNA guide
cagaggugaaaacucacaugg

SEQ ID NO: 34121 - RNA, 21 nt, Artificial Sequence
  RPE65 RNA guide
cagcacuccaugccacuccuc

SEQ ID NO: 34122 - RNA, 21 nt, Artificial Sequence
  RPE65 RNA guide
caggaggcaaccuauauaccc

SEQ ID NO: 34123 - RNA, 21 nt, Artificial Sequence
  RPE65 RNA guide
caggguuuaaagccacucaug

SEQ ID NO: 34124 - RNA, 21 nt, Artificial Sequence
  RPE65 RNA guide
cagguacauugugagaagaaa

SEQ ID NO: 34125 - RNA, 21 nt, Artificial Sequence
  RPE65 RNA guide
caguggccuuuccaauuuuau

SEQ ID NO: 34126 - RNA, 21 nt, Artificial Sequence
  RPE65 RNA guide
cagugugucugcauggauacg

SEQ ID NO: 34127 - RNA, 21 nt, Artificial Sequence
  RPE65 RNA guide
caucuugccaagguuacccuc

SEQ ID NO: 34128 - RNA, 21 nt, Artificial Sequence
  RPE65 RNA guide
caugacuugccuaggagggua

SEQ ID NO: 34129 - RNA, 21 nt, Artificial Sequence
  RPE65 RNA guide
caugaguggcuuuaaacccug

SEQ ID NO: 34130 - RNA, 21 nt, Artificial Sequence
  RPE65 RNA guide
caugauaauguucccucguau

SEQ ID NO: 34131 - RNA, 21 nt, Artificial Sequence
  RPE65 RNA guide
caugcagacacacuggcccag

SEQ ID NO: 34132 - RNA, 21 nt, Artificial Sequence
  RPE65 RNA guide
caugccacuccuccuccucaa

SEQ ID NO: 34133 - RNA, 21 nt, Artificial Sequence
  RPE65 RNA guide
cauggaauaaaggagaagcua

SEQ ID NO: 34134 - RNA, 21 nt, Artificial Sequence
  RPE65 RNA guide
cauggauacgagggaacauua

SEQ ID NO: 34135 - RNA, 21 nt, Artificial Sequence
  RPE65 RNA guide
caugggaggaggagccaagcu

SEQ ID NO: 34136 - RNA, 21 nt, Artificial Sequence
  RPE65 RNA guide
caugucuguugaauacagggu

SEQ ID NO: 34137 - RNA, 21 nt, Artificial Sequence
  RPE65 RNA guide
caugugaguuuucaccucuga

SEQ ID NO: 34138 - RNA, 21 nt, Artificial Sequence
  RPE65 RNA guide
cauguuggaccccaaagcccu

SEQ ID NO: 34139 - RNA, 21 nt, Artificial Sequence
  RPE65 RNA guide
cauuaaaugagagcgcagugu

SEQ ID NO: 34140 - RNA, 21 nt, Artificial Sequence
  RPE65 RNA guide
cauuacaagcauuaaaugaga

SEQ ID NO: 34141 - RNA, 21 nt, Artificial Sequence
  RPE65 RNA guide
cauuaucauggaauaaaggag

SEQ ID NO: 34142 - RNA, 21 nt, Artificial Sequence
  RPE65 RNA guide
cauuggccaucuugauuccuu

SEQ ID NO: 34143 - RNA, 21 nt, Artificial Sequence
  RPE65 RNA guide
cauugugagaagaaagugggu

SEQ ID NO: 34144 - RNA, 21 nt, Artificial Sequence
  RPE65 RNA guide
ccaaagcccuaggcuuuagcu

SEQ ID NO: 34145 - RNA, 21 nt, Artificial Sequence
  RPE65 RNA guide
ccaacaugaguggcuuuaaac

SEQ ID NO: 34146 - RNA, 21 nt, Artificial Sequence
  RPE65 RNA guide
ccaagaauuggaggucaacau

SEQ ID NO: 34147 - RNA, 21 nt, Artificial Sequence
  RPE65 RNA guide
ccaagcuaggcccuacuuuga

SEQ ID NO: 34148 - RNA, 21 nt, Artificial Sequence
  RPE65 RNA guide
ccaagguuacccuccuaggca

SEQ ID NO: 34149 - RNA, 21 nt, Artificial Sequence
  RPE65 RNA guide
ccacucauguuggaccccaaa

SEQ ID NO: 34150 - RNA, 21 nt, Artificial Sequence
  RPE65 RNA guide
ccacuccuccuccucaaagua

SEQ ID NO: 34151 - RNA, 21 nt, Artificial Sequence
  RPE65 RNA guide
ccacuuucuucucacaaugua

SEQ ID NO: 34152 - RNA, 21 nt, Artificial Sequence
  RPE65 RNA guide
ccagguacauugugagaagaa

SEQ ID NO: 34153 - RNA, 21 nt, Artificial Sequence
  RPE65 RNA guide
ccaguggccuuuccaauuuua

SEQ ID NO: 34154 - RNA, 21 nt, Artificial Sequence
  RPE65 RNA guide
ccagugugucugcauggauac

SEQ ID NO: 34155 - RNA, 21 nt, Artificial Sequence
  RPE65 RNA guide
ccaugauaauguucccucgua

SEQ ID NO: 34156 - RNA, 21 nt, Artificial Sequence
  RPE65 RNA guide
ccaugcagacacacuggccca

SEQ ID NO: 34157 - RNA, 21 nt, Artificial Sequence
  RPE65 RNA guide
ccaugccacuccuccuccuca

SEQ ID NO: 34158 - RNA, 21 nt, Artificial Sequence
  RPE65 RNA guide
ccaugugaguuuucaccucug

SEQ ID NO: 34159 - RNA, 21 nt, Artificial Sequence
  RPE65 RNA guide
ccauuggccaucuugauuccu

SEQ ID NO: 34160 - RNA, 21 nt, Artificial Sequence
  RPE65 RNA guide
cccaaagcccuaggcuuuagc

SEQ ID NO: 34161 - RNA, 21 nt, Artificial Sequence
  RPE65 RNA guide
cccacuuucuucucacaaugu

SEQ ID NO: 34162 - RNA, 21 nt, Artificial Sequence
  RPE65 RNA guide
cccagguacauugugagaaga

SEQ ID NO: 34163 - RNA, 21 nt, Artificial Sequence
  RPE65 RNA guide
cccaguggccuuuccaauuuu

SEQ ID NO: 34164 - RNA, 21 nt, Artificial Sequence
  RPE65 RNA guide
cccaugugaguuuucaccucu

SEQ ID NO: 34165 - RNA, 21 nt, Artificial Sequence
  RPE65 RNA guide
ccccaaagcccuaggcuuuag

SEQ ID NO: 34166 - RNA, 21 nt, Artificial Sequence
  RPE65 RNA guide
ccccuuucccaguggccuuuc

SEQ ID NO: 34167 - RNA, 21 nt, Artificial Sequence
  RPE65 RNA guide
cccgaccccuuucccaguggc

SEQ ID NO: 34168 - RNA, 21 nt, Artificial Sequence
  RPE65 RNA guide
cccuacuuugaggaggaggag

SEQ ID NO: 34169 - RNA, 21 nt, Artificial Sequence
  RPE65 RNA guide
cccuaggcuuuagcuucuccu

SEQ ID NO: 34170 - RNA, 21 nt, Artificial Sequence
  RPE65 RNA guide
cccuccuaggcaagucauguc

SEQ ID NO: 34171 - RNA, 21 nt, Artificial Sequence
  RPE65 RNA guide
cccucguauccaugcagacac

SEQ ID NO: 34172 - RNA, 21 nt, Artificial Sequence
  RPE65 RNA guide
cccuguauucaacagacauga

SEQ ID NO: 34173 - RNA, 21 nt, Artificial Sequence
  RPE65 RNA guide
cccuuucccaguggccuuucc

SEQ ID NO: 34174 - RNA, 21 nt, Artificial Sequence
  RPE65 RNA guide
ccgaccccuuucccaguggcc

SEQ ID NO: 34175 - RNA, 21 nt, Artificial Sequence
  RPE65 RNA guide
ccuacuuugaggaggaggagu

SEQ ID NO: 34176 - RNA, 21 nt, Artificial Sequence
  RPE65 RNA guide
ccuagcuuggcuccuccuccc

SEQ ID NO: 34177 - RNA, 21 nt, Artificial Sequence
  RPE65 RNA guide
ccuaggaggguaaccuuggca

SEQ ID NO: 34178 - RNA, 21 nt, Artificial Sequence
  RPE65 RNA guide
ccuaggcaagucaugucuguu

SEQ ID NO: 34179 - RNA, 21 nt, Artificial Sequence
  RPE65 RNA guide
ccuaggcuuuagcuucuccuu

SEQ ID NO: 34180 - RNA, 21 nt, Artificial Sequence
  RPE65 RNA guide
ccuagggcuuugggguccaac

SEQ ID NO: 34181 - RNA, 21 nt, Artificial Sequence
  RPE65 RNA guide
ccuauauacccacuuucuucu

SEQ ID NO: 34182 - RNA, 21 nt, Artificial Sequence
  RPE65 RNA guide
ccucaaaguagggccuagcuu

SEQ ID NO: 34183 - RNA, 21 nt, Artificial Sequence
  RPE65 RNA guide
ccucccaugugaguuuucacc

SEQ ID NO: 34184 - RNA, 21 nt, Artificial Sequence
  RPE65 RNA guide
ccuccuaggcaagucaugucu

SEQ ID NO: 34185 - RNA, 21 nt, Artificial Sequence
  RPE65 RNA guide
ccuccucaaaguagggccuag

SEQ ID NO: 34186 - RNA, 21 nt, Artificial Sequence
  RPE65 RNA guide
ccuccucccaugugaguuuuc

SEQ ID NO: 34187 - RNA, 21 nt, Artificial Sequence
  RPE65 RNA guide
ccuccuccucaaaguagggcc

SEQ ID NO: 34188 - RNA, 21 nt, Artificial Sequence
  RPE65 RNA guide
ccuccugaguucagaggugaa

SEQ ID NO: 34189 - RNA, 21 nt, Artificial Sequence
  RPE65 RNA guide
ccucguauccaugcagacaca

SEQ ID NO: 34190 - RNA, 21 nt, Artificial Sequence
  RPE65 RNA guide
ccucugaacucaggaggcaac

SEQ ID NO: 34191 - RNA, 21 nt, Artificial Sequence
  RPE65 RNA guide
ccugaguucagaggugaaaac

SEQ ID NO: 34192 - RNA, 21 nt, Artificial Sequence
  RPE65 RNA guide
ccugggccagugugucugcau

SEQ ID NO: 34193 - RNA, 21 nt, Artificial Sequence
  RPE65 RNA guide
ccuguauucaacagacaugac

SEQ ID NO: 34194 - RNA, 21 nt, Artificial Sequence
  RPE65 RNA guide
ccuuggcaagauguugaccuc

SEQ ID NO: 34195 - RNA, 21 nt, Artificial Sequence
  RPE65 RNA guide
ccuuuauuccaugauaauguu

SEQ ID NO: 34196 - RNA, 21 nt, Artificial Sequence
  RPE65 RNA guide
ccuuucccaguggccuuucca

SEQ ID NO: 34197 - RNA, 21 nt, Artificial Sequence
  RPE65 RNA guide
cgaccccuuucccaguggccu

SEQ ID NO: 34198 - RNA, 21 nt, Artificial Sequence
  RPE65 RNA guide
cgagggaacauuaucauggaa

SEQ ID NO: 34199 - RNA, 21 nt, Artificial Sequence
  RPE65 RNA guide
cgcucucauuuaaugcuugua

SEQ ID NO: 34200 - RNA, 21 nt, Artificial Sequence
  RPE65 RNA guide
cguauccaugcagacacacug

SEQ ID NO: 34201 - RNA, 21 nt, Artificial Sequence
  RPE65 RNA guide
cuaaagccuagggcuuugggg

SEQ ID NO: 34202 - RNA, 21 nt, Artificial Sequence
  RPE65 RNA guide
cuacuuugaggaggaggagug

SEQ ID NO: 34203 - RNA, 21 nt, Artificial Sequence
  RPE65 RNA guide
cuagacacugcgcucucauuu

SEQ ID NO: 34204 - RNA, 21 nt, Artificial Sequence
  RPE65 RNA guide
cuagcuuggcuccuccuccca

SEQ ID NO: 34205 - RNA, 21 nt, Artificial Sequence
  RPE65 RNA guide
cuaggaggguaaccuuggcaa

SEQ ID NO: 34206 - RNA, 21 nt, Artificial Sequence
  RPE65 RNA guide
cuaggcaagucaugucuguug

SEQ ID NO: 34207 - RNA, 21 nt, Artificial Sequence
  RPE65 RNA guide
cuaggcccuacuuugaggagg

SEQ ID NO: 34208 - RNA, 21 nt, Artificial Sequence
  RPE65 RNA guide
cuaggcuuuagcuucuccuuu

SEQ ID NO: 34209 - RNA, 21 nt, Artificial Sequence
  RPE65 RNA guide
cuagggcuuugggguccaaca

SEQ ID NO: 34210 - RNA, 21 nt, Artificial Sequence
  RPE65 RNA guide
cuauauacccacuuucuucuc

SEQ ID NO: 34211 - RNA, 21 nt, Artificial Sequence
  RPE65 RNA guide
cuauuauuaugaagugcuuug

SEQ ID NO: 34212 - RNA, 21 nt, Artificial Sequence
  RPE65 RNA guide
cucaaaguagggccuagcuug

SEQ ID NO: 34213 - RNA, 21 nt, Artificial Sequence
  RPE65 RNA guide
cucacaauguaccugggccag

SEQ ID NO: 34214 - RNA, 21 nt, Artificial Sequence
  RPE65 RNA guide
cucacaugggaggaggagcca

SEQ ID NO: 34215 - RNA, 21 nt, Artificial Sequence
  RPE65 RNA guide
cucaggaggcaaccuauauac

SEQ ID NO: 34216 - RNA, 21 nt, Artificial Sequence
  RPE65 RNA guide
cucauguuggaccccaaagcc

SEQ ID NO: 34217 - RNA, 21 nt, Artificial Sequence
  RPE65 RNA guide
cuccaugccacuccuccuccu

SEQ ID NO: 34218 - RNA, 21 nt, Artificial Sequence
  RPE65 RNA guide
cucccaugugaguuuucaccu

SEQ ID NO: 34219 - RNA, 21 nt, Artificial Sequence
  RPE65 RNA guide
cuccuaggcaagucaugucug

SEQ ID NO: 34220 - RNA, 21 nt, Artificial Sequence
  RPE65 RNA guide
cuccucaaaguagggccuagc

SEQ ID NO: 34221 - RNA, 21 nt, Artificial Sequence
  RPE65 RNA guide
cuccucccaugugaguuuuca

SEQ ID NO: 34222 - RNA, 21 nt, Artificial Sequence
  RPE65 RNA guide
cuccuccucaaaguagggccu

SEQ ID NO: 34223 - RNA, 21 nt, Artificial Sequence
  RPE65 RNA guide
cuccuccucccaugugaguuu

SEQ ID NO: 34224 - RNA, 21 nt, Artificial Sequence
  RPE65 RNA guide
cuccuccuccucaaaguaggg

SEQ ID NO: 34225 - RNA, 21 nt, Artificial Sequence
  RPE65 RNA guide
cuccugaguucagaggugaaa

SEQ ID NO: 34226 - RNA, 21 nt, Artificial Sequence
  RPE65 RNA guide
cuccuuuauuccaugauaaug

SEQ ID NO: 34227 - RNA, 21 nt, Artificial Sequence
  RPE65 RNA guide
cucguauccaugcagacacac

SEQ ID NO: 34228 - RNA, 21 nt, Artificial Sequence
  RPE65 RNA guide
cucugaacucaggaggcaacc

SEQ ID NO: 34229 - RNA, 21 nt, Artificial Sequence
  RPE65 RNA guide
cugaacucaggaggcaaccua

SEQ ID NO: 34230 - RNA, 21 nt, Artificial Sequence
  RPE65 RNA guide
cugaguucagaggugaaaacu

SEQ ID NO: 34231 - RNA, 21 nt, Artificial Sequence
  RPE65 RNA guide
cugcauggauacgagggaaca

SEQ ID NO: 34232 - RNA, 21 nt, Artificial Sequence
  RPE65 RNA guide
cugcgcucucauuuaaugcuu

SEQ ID NO: 34233 - RNA, 21 nt, Artificial Sequence
  RPE65 RNA guide
cuggcccagguacauugugag

SEQ ID NO: 34234 - RNA, 21 nt, Artificial Sequence
  RPE65 RNA guide
cugggccagugugucugcaug

SEQ ID NO: 34235 - RNA, 21 nt, Artificial Sequence
  RPE65 RNA guide
cuguauucaacagacaugacu

SEQ ID NO: 34236 - RNA, 21 nt, Artificial Sequence
  RPE65 RNA guide
cuguugaauacaggguuuaaa

SEQ ID NO: 34237 - RNA, 21 nt, Artificial Sequence
  RPE65 RNA guide
cuucucacaauguaccugggc

SEQ ID NO: 34238 - RNA, 21 nt, Artificial Sequence
  RPE65 RNA guide
cuucuccuuuauuccaugaua

SEQ ID NO: 34239 - RNA, 21 nt, Artificial Sequence
  RPE65 RNA guide
cuugccaagguuacccuccua

SEQ ID NO: 34240 - RNA, 21 nt, Artificial Sequence
  RPE65 RNA guide
cuugccuaggaggguaaccuu

SEQ ID NO: 34241 - RNA, 21 nt, Artificial Sequence
  RPE65 RNA guide
cuuggcaagauguugaccucc

SEQ ID NO: 34242 - RNA, 21 nt, Artificial Sequence
  RPE65 RNA guide
cuuggcuccuccucccaugug

SEQ ID NO: 34243 - RNA, 21 nt, Artificial Sequence
  RPE65 RNA guide
cuuuaaacccuguauucaaca

SEQ ID NO: 34244 - RNA, 21 nt, Artificial Sequence
  RPE65 RNA guide
cuuuagcuucuccuuuauucc

SEQ ID NO: 34245 - RNA, 21 nt, Artificial Sequence
  RPE65 RNA guide
cuuuauuccaugauaauguuc

SEQ ID NO: 34246 - RNA, 21 nt, Artificial Sequence
  RPE65 RNA guide
cuuucccaguggccuuuccaa

SEQ ID NO: 34247 - RNA, 21 nt, Artificial Sequence
  RPE65 RNA guide
cuuucuucucacaauguaccu

SEQ ID NO: 34248 - RNA, 21 nt, Artificial Sequence
  RPE65 RNA guide
cuuugaggaggaggaguggca

SEQ ID NO: 34249 - RNA, 21 nt, Artificial Sequence
  RPE65 RNA guide
cuuugggguccaacaugagug

SEQ ID NO: 34250 - RNA, 21 nt, Artificial Sequence
  RPE65 RNA guide
cuuuuuauaaaauuggaaagg

SEQ ID NO: 34251 - RNA, 21 nt, Artificial Sequence
  RPE65 RNA guide
gaaaaaggaaucaagauggcc

SEQ ID NO: 34252 - RNA, 21 nt, Artificial Sequence
  RPE65 RNA guide
gaaaacucacaugggaggagg

SEQ ID NO: 34253 - RNA, 21 nt, Artificial Sequence
  RPE65 RNA guide
gaaaggccacugggaaagggg

SEQ ID NO: 34254 - RNA, 21 nt, Artificial Sequence
  RPE65 RNA guide
gaaaguggguauauagguugc

SEQ ID NO: 34255 - RNA, 21 nt, Artificial Sequence
  RPE65 RNA guide
gaacauuaucauggaauaaag

SEQ ID NO: 34256 - RNA, 21 nt, Artificial Sequence
  RPE65 RNA guide
gaacucaggaggcaaccuaua

SEQ ID NO: 34257 - RNA, 21 nt, Artificial Sequence
  RPE65 RNA guide
gaagaaaguggguauauaggu

SEQ ID NO: 34258 - RNA, 21 nt, Artificial Sequence
  RPE65 RNA guide
gaagcuaaagccuagggcuuu

SEQ ID NO: 34259 - RNA, 21 nt, Artificial Sequence
  RPE65 RNA guide
gaauaaaggagaagcuaaagc

SEQ ID NO: 34260 - RNA, 21 nt, Artificial Sequence
  RPE65 RNA guide
gaauacaggguuuaaagccac

SEQ ID NO: 34261 - RNA, 21 nt, Artificial Sequence
  RPE65 RNA guide
gaaucaagauggccaaugguu

SEQ ID NO: 34262 - RNA, 21 nt, Artificial Sequence
  RPE65 RNA guide
gaauuggaggucaacaucuug

SEQ ID NO: 34263 - RNA, 21 nt, Artificial Sequence
  RPE65 RNA guide
gacacacuggcccagguacau

SEQ ID NO: 34264 - RNA, 21 nt, Artificial Sequence
  RPE65 RNA guide
gacacugcgcucucauuuaau

SEQ ID NO: 34265 - RNA, 21 nt, Artificial Sequence
  RPE65 RNA guide
gacaugacuugccuaggaggg

SEQ ID NO: 34266 - RNA, 21 nt, Artificial Sequence
  RPE65 RNA guide
gaccccaaagcccuaggcuuu

SEQ ID NO: 34267 - RNA, 21 nt, Artificial Sequence
  RPE65 RNA guide
gaccccuuucccaguggccuu

SEQ ID NO: 34268 - RNA, 21 nt, Artificial Sequence
  RPE65 RNA guide
gaccuccaauucuugguuuua

SEQ ID NO: 34269 - RNA, 21 nt, Artificial Sequence
  RPE65 RNA guide
gacuugccuaggaggguaacc

SEQ ID NO: 34270 - RNA, 21 nt, Artificial Sequence
  RPE65 RNA guide
gagaagaaaguggguauauag

SEQ ID NO: 34271 - RNA, 21 nt, Artificial Sequence
  RPE65 RNA guide
gagaagcuaaagccuagggcu

SEQ ID NO: 34272 - RNA, 21 nt, Artificial Sequence
  RPE65 RNA guide
gagccaagcuaggcccuacuu

SEQ ID NO: 34273 - RNA, 21 nt, Artificial Sequence
  RPE65 RNA guide
gaggagccaagcuaggcccua

SEQ ID NO: 34274 - RNA, 21 nt, Artificial Sequence
  RPE65 RNA guide
gaggaggagccaagcuaggcc

SEQ ID NO: 34275 - RNA, 21 nt, Artificial Sequence
  RPE65 RNA guide
gaggaggaggaguggcaugga

SEQ ID NO: 34276 - RNA, 21 nt, Artificial Sequence
  RPE65 RNA guide
gaggaggaguggcauggagug

SEQ ID NO: 34277 - RNA, 21 nt, Artificial Sequence
  RPE65 RNA guide
gaggaguggcauggagugcug

SEQ ID NO: 34278 - RNA, 21 nt, Artificial Sequence
  RPE65 RNA guide
gaggcaaccuauauacccacu

SEQ ID NO: 34279 - RNA, 21 nt, Artificial Sequence
  RPE65 RNA guide
gagggaacauuaucauggaau

SEQ ID NO: 34280 - RNA, 21 nt, Artificial Sequence
  RPE65 RNA guide
gaggguaaccuuggcaagaug

SEQ ID NO: 34281 - RNA, 21 nt, Artificial Sequence
  RPE65 RNA guide
gaggucaacaucuugccaagg

SEQ ID NO: 34282 - RNA, 21 nt, Artificial Sequence
  RPE65 RNA guide
gaggugaaaacucacauggga

SEQ ID NO: 34283 - RNA, 21 nt, Artificial Sequence
  RPE65 RNA guide
gaguggcuuuaaacccuguau

SEQ ID NO: 34284 - RNA, 21 nt, Artificial Sequence
  RPE65 RNA guide
gaguucagaggugaaaacuca

SEQ ID NO: 34285 - RNA, 21 nt, Artificial Sequence
  RPE65 RNA guide
gaguuuucaccucugaacuca

SEQ ID NO: 34286 - RNA, 21 nt, Artificial Sequence
  RPE65 RNA guide
gauaauguucccucguaucca

SEQ ID NO: 34287 - RNA, 21 nt, Artificial Sequence
  RPE65 RNA guide
gauacgagggaacauuaucau

SEQ ID NO: 34288 - RNA, 21 nt, Artificial Sequence
  RPE65 RNA guide
gauguugaccuccaauucuug

SEQ ID NO: 34289 - RNA, 21 nt, Artificial Sequence
  RPE65 RNA guide
gcaaccuauauacccacuuuc

SEQ ID NO: 34290 - RNA, 21 nt, Artificial Sequence
  RPE65 RNA guide
gcaagauguugaccuccaauu

SEQ ID NO: 34291 - RNA, 21 nt, Artificial Sequence
  RPE65 RNA guide
gcaagucaugucuguugaaua

SEQ ID NO: 34292 - RNA, 21 nt, Artificial Sequence
  RPE65 RNA guide
gcacuccaugccacuccuccu

SEQ ID NO: 34293 - RNA, 21 nt, Artificial Sequence
  RPE65 RNA guide
gcacuucauaauaauagcuau

SEQ ID NO: 34294 - RNA, 21 nt, Artificial Sequence
  RPE65 RNA guide
gcagacacacuggcccaggua

SEQ ID NO: 34295 - RNA, 21 nt, Artificial Sequence
  RPE65 RNA guide
gcagcacuccaugccacuccu

SEQ ID NO: 34296 - RNA, 21 nt, Artificial Sequence
  RPE65 RNA guide
gcauggauacgagggaacauu

SEQ ID NO: 34297 - RNA, 21 nt, Artificial Sequence
  RPE65 RNA guide
gcauuaaaugagagcgcagug

SEQ ID NO: 34298 - RNA, 21 nt, Artificial Sequence
  RPE65 RNA guide
gccaagcuaggcccuacuuug

SEQ ID NO: 34299 - RNA, 21 nt, Artificial Sequence
  RPE65 RNA guide
gccaagguuacccuccuaggc

SEQ ID NO: 34300 - RNA, 21 nt, Artificial Sequence
  RPE65 RNA guide
gccacucauguuggaccccaa

SEQ ID NO: 34301 - RNA, 21 nt, Artificial Sequence
  RPE65 RNA guide
gccacuccuccuccucaaagu

SEQ ID NO: 34302 - RNA, 21 nt, Artificial Sequence
  RPE65 RNA guide
gccagugugucugcauggaua

SEQ ID NO: 34303 - RNA, 21 nt, Artificial Sequence
  RPE65 RNA guide
gccaucuugauuccuuuuucu

SEQ ID NO: 34304 - RNA, 21 nt, Artificial Sequence
  RPE65 RNA guide
gcccagguacauugugagaag

SEQ ID NO: 34305 - RNA, 21 nt, Artificial Sequence
  RPE65 RNA guide
gcccuacuuugaggaggagga

SEQ ID NO: 34306 - RNA, 21 nt, Artificial Sequence
  RPE65 RNA guide
gcccuaggcuuuagcuucucc

SEQ ID NO: 34307 - RNA, 21 nt, Artificial Sequence
  RPE65 RNA guide
gccuagcuuggcuccuccucc

SEQ ID NO: 34308 - RNA, 21 nt, Artificial Sequence
  RPE65 RNA guide
gccuaggaggguaaccuuggc

SEQ ID NO: 34309 - RNA, 21 nt, Artificial Sequence
  RPE65 RNA guide
gccuagggcuuugggguccaa

SEQ ID NO: 34310 - RNA, 21 nt, Artificial Sequence
  RPE65 RNA guide
gccuccugaguucagagguga

SEQ ID NO: 34311 - RNA, 21 nt, Artificial Sequence
  RPE65 RNA guide
gcgcucucauuuaaugcuugu

SEQ ID NO: 34312 - RNA, 21 nt, Artificial Sequence
  RPE65 RNA guide
gcuaaagccuagggcuuuggg

SEQ ID NO: 34313 - RNA, 21 nt, Artificial Sequence
  RPE65 RNA guide
gcuagacacugcgcucucauu

SEQ ID NO: 34314 - RNA, 21 nt, Artificial Sequence
  RPE65 RNA guide
gcuaggcccuacuuugaggag

SEQ ID NO: 34315 - RNA, 21 nt, Artificial Sequence
  RPE65 RNA guide
gcuauuauuaugaagugcuuu

SEQ ID NO: 34316 - RNA, 21 nt, Artificial Sequence
  RPE65 RNA guide
gcuccuccucccaugugaguu

SEQ ID NO: 34317 - RNA, 21 nt, Artificial Sequence
  RPE65 RNA guide
gcucucauuuaaugcuuguaa

SEQ ID NO: 34318 - RNA, 21 nt, Artificial Sequence
  RPE65 RNA guide
gcuucuccuuuauuccaugau

SEQ ID NO: 34319 - RNA, 21 nt, Artificial Sequence
  RPE65 RNA guide
gcuuggcuccuccucccaugu

SEQ ID NO: 34320 - RNA, 21 nt, Artificial Sequence
  RPE65 RNA guide
gcuuuaaacccuguauucaac

SEQ ID NO: 34321 - RNA, 21 nt, Artificial Sequence
  RPE65 RNA guide
gcuuuagcuucuccuuuauuc

SEQ ID NO: 34322 - RNA, 21 nt, Artificial Sequence
  RPE65 RNA guide
gcuuugggguccaacaugagu

SEQ ID NO: 34323 - RNA, 21 nt, Artificial Sequence
  RPE65 RNA guide
ggaaaggccacugggaaaggg

SEQ ID NO: 34324 - RNA, 21 nt, Artificial Sequence
  RPE65 RNA guide
ggaacauuaucauggaauaaa

SEQ ID NO: 34325 - RNA, 21 nt, Artificial Sequence
  RPE65 RNA guide
ggaauaaaggagaagcuaaag

SEQ ID NO: 34326 - RNA, 21 nt, Artificial Sequence
  RPE65 RNA guide
ggaaucaagauggccaauggu

SEQ ID NO: 34327 - RNA, 21 nt, Artificial Sequence
  RPE65 RNA guide
ggaccccaaagcccuaggcuu

SEQ ID NO: 34328 - RNA, 21 nt, Artificial Sequence
  RPE65 RNA guide
ggagaagcuaaagccuagggc

SEQ ID NO: 34329 - RNA, 21 nt, Artificial Sequence
  RPE65 RNA guide
ggagccaagcuaggcccuacu

SEQ ID NO: 34330 - RNA, 21 nt, Artificial Sequence
  RPE65 RNA guide
ggaggagccaagcuaggcccu

SEQ ID NO: 34331 - RNA, 21 nt, Artificial Sequence
  RPE65 RNA guide
ggaggaggagccaagcuaggc

SEQ ID NO: 34332 - RNA, 21 nt, Artificial Sequence
  RPE65 RNA guide
ggaggaggaguggcauggagu

SEQ ID NO: 34333 - RNA, 21 nt, Artificial Sequence
  RPE65 RNA guide
ggaggaguggcauggagugcu

SEQ ID NO: 34334 - RNA, 21 nt, Artificial Sequence
  RPE65 RNA guide
ggaggcaaccuauauacccac

SEQ ID NO: 34335 - RNA, 21 nt, Artificial Sequence
  RPE65 RNA guide
ggaggguaaccuuggcaagau

SEQ ID NO: 34336 - RNA, 21 nt, Artificial Sequence
  RPE65 RNA guide
ggaggucaacaucuugccaag

SEQ ID NO: 34337 - RNA, 21 nt, Artificial Sequence
  RPE65 RNA guide
ggaguggcauggagugcugcu

SEQ ID NO: 34338 - RNA, 21 nt, Artificial Sequence
  RPE65 RNA guide
ggauacgagggaacauuauca

SEQ ID NO: 34339 - RNA, 21 nt, Artificial Sequence
  RPE65 RNA guide
ggcaaccuauauacccacuuu

SEQ ID NO: 34340 - RNA, 21 nt, Artificial Sequence
  RPE65 RNA guide
ggcaagauguugaccuccaau

SEQ ID NO: 34341 - RNA, 21 nt, Artificial Sequence
  RPE65 RNA guide
ggcaagucaugucuguugaau

SEQ ID NO: 34342 - RNA, 21 nt, Artificial Sequence
  RPE65 RNA guide
ggccagugugucugcauggau

SEQ ID NO: 34343 - RNA, 21 nt, Artificial Sequence
  RPE65 RNA guide
ggccaucuugauuccuuuuuc

SEQ ID NO: 34344 - RNA, 21 nt, Artificial Sequence
  RPE65 RNA guide
ggcccagguacauugugagaa

SEQ ID NO: 34345 - RNA, 21 nt, Artificial Sequence
  RPE65 RNA guide
ggcccuacuuugaggaggagg

SEQ ID NO: 34346 - RNA, 21 nt, Artificial Sequence
  RPE65 RNA guide
ggccuagcuuggcuccuccuc

SEQ ID NO: 34347 - RNA, 21 nt, Artificial Sequence
  RPE65 RNA guide
ggcuccuccucccaugugagu

SEQ ID NO: 34348 - RNA, 21 nt, Artificial Sequence
  RPE65 RNA guide
ggcuuuaaacccuguauucaa

SEQ ID NO: 34349 - RNA, 21 nt, Artificial Sequence
  RPE65 RNA guide
ggcuuuagcuucuccuuuauu

SEQ ID NO: 34350 - RNA, 21 nt, Artificial Sequence
  RPE65 RNA guide
ggcuuugggguccaacaugag

SEQ ID NO: 34351 - RNA, 21 nt, Artificial Sequence
  RPE65 RNA guide
gggaacauuaucauggaauaa

SEQ ID NO: 34352 - RNA, 21 nt, Artificial Sequence
  RPE65 RNA guide
gggagaaauaauagaaucuac

SEQ ID NO: 34353 - RNA, 21 nt, Artificial Sequence
  RPE65 RNA guide
gggaggaggagccaagcuagg

SEQ ID NO: 34354 - RNA, 21 nt, Artificial Sequence
  RPE65 RNA guide
gggccagugugucugcaugga

SEQ ID NO: 34355 - RNA, 21 nt, Artificial Sequence
  RPE65 RNA guide
gggccuagcuuggcuccuccu

SEQ ID NO: 34356 - RNA, 21 nt, Artificial Sequence
  RPE65 RNA guide
gggcuuugggguccaacauga

SEQ ID NO: 34357 - RNA, 21 nt, Artificial Sequence
  RPE65 RNA guide
gggguccaacaugaguggcuu

SEQ ID NO: 34358 - RNA, 21 nt, Artificial Sequence
  RPE65 RNA guide
ggguaaccuuggcaagauguu

SEQ ID NO: 34359 - RNA, 21 nt, Artificial Sequence
  RPE65 RNA guide
ggguauauagguugccuccug

SEQ ID NO: 34360 - RNA, 21 nt, Artificial Sequence
  RPE65 RNA guide
ggguccaacaugaguggcuuu

SEQ ID NO: 34361 - RNA, 21 nt, Artificial Sequence
  RPE65 RNA guide
ggguuuaaagccacucauguu

SEQ ID NO: 34362 - RNA, 21 nt, Artificial Sequence
  RPE65 RNA guide
gguaaccuuggcaagauguug

SEQ ID NO: 34363 - RNA, 21 nt, Artificial Sequence
  RPE65 RNA guide
gguacauugugagaagaaagu

SEQ ID NO: 34364 - RNA, 21 nt, Artificial Sequence
  RPE65 RNA guide
gguagauucuauuauuucucc

SEQ ID NO: 34365 - RNA, 21 nt, Artificial Sequence
  RPE65 RNA guide
gguauauagguugccuccuga

SEQ ID NO: 34366 - RNA, 21 nt, Artificial Sequence
  RPE65 RNA guide
ggucaacaucuugccaagguu

SEQ ID NO: 34367 - RNA, 21 nt, Artificial Sequence
  RPE65 RNA guide
gguccaacaugaguggcuuua

SEQ ID NO: 34368 - RNA, 21 nt, Artificial Sequence
  RPE65 RNA guide
ggugaaaacucacaugggagg

SEQ ID NO: 34369 - RNA, 21 nt, Artificial Sequence
  RPE65 RNA guide
gguuacccuccuaggcaaguc

SEQ ID NO: 34370 - RNA, 21 nt, Artificial Sequence
  RPE65 RNA guide
gguugccuccugaguucagag

SEQ ID NO: 34371 - RNA, 21 nt, Artificial Sequence
  RPE65 RNA guide
gguuuaaagccacucauguug

SEQ ID NO: 34372 - RNA, 21 nt, Artificial Sequence
  RPE65 RNA guide
guaaagcagcacuccaugcca

SEQ ID NO: 34373 - RNA, 21 nt, Artificial Sequence
  RPE65 RNA guide
guaaccuuggcaagauguuga

SEQ ID NO: 34374 - RNA, 21 nt, Artificial Sequence
  RPE65 RNA guide
guacauugugagaagaaagug

SEQ ID NO: 34375 - RNA, 21 nt, Artificial Sequence
  RPE65 RNA guide
guaccugggccagugugucug

SEQ ID NO: 34376 - RNA, 21 nt, Artificial Sequence
  RPE65 RNA guide
guagggccuagcuuggcuccu

SEQ ID NO: 34377 - RNA, 21 nt, Artificial Sequence
  RPE65 RNA guide
guauauagguugccuccugag

SEQ ID NO: 34378 - RNA, 21 nt, Artificial Sequence
  RPE65 RNA guide
guauccaugcagacacacugg

SEQ ID NO: 34379 - RNA, 21 nt, Artificial Sequence
  RPE65 RNA guide
guauucaacagacaugacuug

SEQ ID NO: 34380 - RNA, 21 nt, Artificial Sequence
  RPE65 RNA guide
gucaacaucuugccaagguua

SEQ ID NO: 34381 - RNA, 21 nt, Artificial Sequence
  RPE65 RNA guide
gucaugucuguugaauacagg

SEQ ID NO: 34382 - RNA, 21 nt, Artificial Sequence
  RPE65 RNA guide
guccaacaugaguggcuuuaa

SEQ ID NO: 34383 - RNA, 21 nt, Artificial Sequence
  RPE65 RNA guide
gucugcauggauacgagggaa

SEQ ID NO: 34384 - RNA, 21 nt, Artificial Sequence
  RPE65 RNA guide
gucuguugaauacaggguuua

SEQ ID NO: 34385 - RNA, 21 nt, Artificial Sequence
  RPE65 RNA guide
gugaaaacucacaugggagga

SEQ ID NO: 34386 - RNA, 21 nt, Artificial Sequence
  RPE65 RNA guide
gugagaagaaaguggguauau

SEQ ID NO: 34387 - RNA, 21 nt, Artificial Sequence
  RPE65 RNA guide
gugaguuuucaccucugaacu

SEQ ID NO: 34388 - RNA, 21 nt, Artificial Sequence
  RPE65 RNA guide
guggccuuuccaauuuuauaa

SEQ ID NO: 34389 - RNA, 21 nt, Artificial Sequence
  RPE65 RNA guide
guggcuuuaaacccuguauuc

SEQ ID NO: 34390 - RNA, 21 nt, Artificial Sequence
  RPE65 RNA guide
guggguauauagguugccucc

SEQ ID NO: 34391 - RNA, 21 nt, Artificial Sequence
  RPE65 RNA guide
gugucugcauggauacgaggg

SEQ ID NO: 34392 - RNA, 21 nt, Artificial Sequence
  RPE65 RNA guide
gugugucugcauggauacgag

SEQ ID NO: 34393 - RNA, 21 nt, Artificial Sequence
  RPE65 RNA guide
guuacccuccuaggcaaguca

SEQ ID NO: 34394 - RNA, 21 nt, Artificial Sequence
  RPE65 RNA guide
guucagaggugaaaacucaca

SEQ ID NO: 34395 - RNA, 21 nt, Artificial Sequence
  RPE65 RNA guide
guucccucguauccaugcaga

SEQ ID NO: 34396 - RNA, 21 nt, Artificial Sequence
  RPE65 RNA guide
guugaauacaggguuuaaagc

SEQ ID NO: 34397 - RNA, 21 nt, Artificial Sequence
  RPE65 RNA guide
guugaccuccaauucuugguu

SEQ ID NO: 34398 - RNA, 21 nt, Artificial Sequence
  RPE65 RNA guide
guugccuccugaguucagagg

SEQ ID NO: 34399 - RNA, 21 nt, Artificial Sequence
  RPE65 RNA guide
guuggaccccaaagcccuagg

SEQ ID NO: 34400 - RNA, 21 nt, Artificial Sequence
  RPE65 RNA guide
guuuaaagccacucauguugg

SEQ ID NO: 34401 - RNA, 21 nt, Artificial Sequence
  RPE65 RNA guide
guuuucaccucugaacucagg

SEQ ID NO: 34402 - RNA, 21 nt, Artificial Sequence
  RPE65 RNA guide
uaaaaccaagaauuggagguc

SEQ ID NO: 34403 - RNA, 21 nt, Artificial Sequence
  RPE65 RNA guide
uaaaauuggaaaggccacugg

SEQ ID NO: 34404 - RNA, 21 nt, Artificial Sequence
  RPE65 RNA guide
uaaaccauuggccaucuugau

SEQ ID NO: 34405 - RNA, 21 nt, Artificial Sequence
  RPE65 RNA guide
uaaacccuguauucaacagac

SEQ ID NO: 34406 - RNA, 21 nt, Artificial Sequence
  RPE65 RNA guide
uaaagcagcacuccaugccac

SEQ ID NO: 34407 - RNA, 21 nt, Artificial Sequence
  RPE65 RNA guide
uaaagccacucauguuggacc

SEQ ID NO: 34408 - RNA, 21 nt, Artificial Sequence
  RPE65 RNA guide
uaaagccuagggcuuuggggu

SEQ ID NO: 34409 - RNA, 21 nt, Artificial Sequence
  RPE65 RNA guide
uaaaggagaagcuaaagccua

SEQ ID NO: 34410 - RNA, 21 nt, Artificial Sequence
  RPE65 RNA guide
uaaccuuggcaagauguugac

SEQ ID NO: 34411 - RNA, 21 nt, Artificial Sequence
  RPE65 RNA guide
uaagguagauucuauuauuuc

SEQ ID NO: 34412 - RNA, 21 nt, Artificial Sequence
  RPE65 RNA guide
uaauguucccucguauccaug

SEQ ID NO: 34413 - RNA, 21 nt, Artificial Sequence
  RPE65 RNA guide
uacaagcauuaaaugagagcg

SEQ ID NO: 34414 - RNA, 21 nt, Artificial Sequence
  RPE65 RNA guide
uacaggguuuaaagccacuca

SEQ ID NO: 34415 - RNA, 21 nt, Artificial Sequence
  RPE65 RNA guide
uacauugugagaagaaagugg

SEQ ID NO: 34416 - RNA, 21 nt, Artificial Sequence
  RPE65 RNA guide
uacccacuuucuucucacaau

SEQ ID NO: 34417 - RNA, 21 nt, Artificial Sequence
  RPE65 RNA guide
uacccuccuaggcaagucaug

SEQ ID NO: 34418 - RNA, 21 nt, Artificial Sequence
  RPE65 RNA guide
uaccugggccagugugucugc

SEQ ID NO: 34419 - RNA, 21 nt, Artificial Sequence
  RPE65 RNA guide
uacgagggaacauuaucaugg

SEQ ID NO: 34420 - RNA, 21 nt, Artificial Sequence
  RPE65 RNA guide
uacuuugaggaggaggagugg

SEQ ID NO: 34421 - RNA, 21 nt, Artificial Sequence
  RPE65 RNA guide
uagacacugcgcucucauuua

SEQ ID NO: 34422 - RNA, 21 nt, Artificial Sequence
  RPE65 RNA guide
uagcuucuccuuuauuccaug

SEQ ID NO: 34423 - RNA, 21 nt, Artificial Sequence
  RPE65 RNA guide
uagcuuggcuccuccucccau

SEQ ID NO: 34424 - RNA, 21 nt, Artificial Sequence
  RPE65 RNA guide
uaggaggguaaccuuggcaag

SEQ ID NO: 34425 - RNA, 21 nt, Artificial Sequence
  RPE65 RNA guide
uaggcaagucaugucuguuga

SEQ ID NO: 34426 - RNA, 21 nt, Artificial Sequence
  RPE65 RNA guide
uaggcccuacuuugaggagga

SEQ ID NO: 34427 - RNA, 21 nt, Artificial Sequence
  RPE65 RNA guide
uaggcuuuagcuucuccuuua

SEQ ID NO: 34428 - RNA, 21 nt, Artificial Sequence
  RPE65 RNA guide
uagggccuagcuuggcuccuc

SEQ ID NO: 34429 - RNA, 21 nt, Artificial Sequence
  RPE65 RNA guide
uagggcuuugggguccaacau

SEQ ID NO: 34430 - RNA, 21 nt, Artificial Sequence
  RPE65 RNA guide
uagguugccuccugaguucag

SEQ ID NO: 34431 - RNA, 21 nt, Artificial Sequence
  RPE65 RNA guide
uauaaaaccaagaauuggagg

SEQ ID NO: 34432 - RNA, 21 nt, Artificial Sequence
  RPE65 RNA guide
uauaaaauuggaaaggccacu

SEQ ID NO: 34433 - RNA, 21 nt, Artificial Sequence
  RPE65 RNA guide
uauacccacuuucuucucaca

SEQ ID NO: 34434 - RNA, 21 nt, Artificial Sequence
  RPE65 RNA guide
uauagguugccuccugaguuc

SEQ ID NO: 34435 - RNA, 21 nt, Artificial Sequence
  RPE65 RNA guide
uauauacccacuuucuucuca

SEQ ID NO: 34436 - RNA, 21 nt, Artificial Sequence
  RPE65 RNA guide
uauauagguugccuccugagu

SEQ ID NO: 34437 - RNA, 21 nt, Artificial Sequence
  RPE65 RNA guide
uaucauggaauaaaggagaag

SEQ ID NO: 34438 - RNA, 21 nt, Artificial Sequence
  RPE65 RNA guide
uauccaugcagacacacuggc

SEQ ID NO: 34439 - RNA, 21 nt, Artificial Sequence
  RPE65 RNA guide
uauuaaaccauuggccaucuu

SEQ ID NO: 34440 - RNA, 21 nt, Artificial Sequence
  RPE65 RNA guide
uauuauuaaaccauuggccau

SEQ ID NO: 34441 - RNA, 21 nt, Artificial Sequence
  RPE65 RNA guide
uauucaacagacaugacuugc

SEQ ID NO: 34442 - RNA, 21 nt, Artificial Sequence
  RPE65 RNA guide
uauuccaugauaauguucccu

SEQ ID NO: 34443 - RNA, 21 nt, Artificial Sequence
  RPE65 RNA guide
ucaaaguagggccuagcuugg

SEQ ID NO: 34444 - RNA, 21 nt, Artificial Sequence
  RPE65 RNA guide
ucaacagacaugacuugccua

SEQ ID NO: 34445 - RNA, 21 nt, Artificial Sequence
  RPE65 RNA guide
ucaacaucuugccaagguuac

SEQ ID NO: 34446 - RNA, 21 nt, Artificial Sequence
  RPE65 RNA guide
ucaagauggccaaugguuuaa

SEQ ID NO: 34447 - RNA, 21 nt, Artificial Sequence
  RPE65 RNA guide
ucacaauguaccugggccagu

SEQ ID NO: 34448 - RNA, 21 nt, Artificial Sequence
  RPE65 RNA guide
ucacaugggaggaggagccaa

SEQ ID NO: 34449 - RNA, 21 nt, Artificial Sequence
  RPE65 RNA guide
ucaccucugaacucaggaggc

SEQ ID NO: 34450 - RNA, 21 nt, Artificial Sequence
  RPE65 RNA guide
ucagaggugaaaacucacaug

SEQ ID NO: 34451 - RNA, 21 nt, Artificial Sequence
  RPE65 RNA guide
ucaggaggcaaccuauauacc

SEQ ID NO: 34452 - RNA, 21 nt, Artificial Sequence
  RPE65 RNA guide
ucauggaauaaaggagaagcu

SEQ ID NO: 34453 - RNA, 21 nt, Artificial Sequence
  RPE65 RNA guide
ucaugucuguugaauacaggg

SEQ ID NO: 34454 - RNA, 21 nt, Artificial Sequence
  RPE65 RNA guide
ucauguuggaccccaaagccc

SEQ ID NO: 34455 - RNA, 21 nt, Artificial Sequence
  RPE65 RNA guide
ucauuacaagcauuaaaugag

SEQ ID NO: 34456 - RNA, 21 nt, Artificial Sequence
  RPE65 RNA guide
uccaacaugaguggcuuuaaa

SEQ ID NO: 34457 - RNA, 21 nt, Artificial Sequence
  RPE65 RNA guide
uccaugauaauguucccucgu

SEQ ID NO: 34458 - RNA, 21 nt, Artificial Sequence
  RPE65 RNA guide
uccaugcagacacacuggccc

SEQ ID NO: 34459 - RNA, 21 nt, Artificial Sequence
  RPE65 RNA guide
uccaugccacuccuccuccuc

SEQ ID NO: 34460 - RNA, 21 nt, Artificial Sequence
  RPE65 RNA guide
ucccaguggccuuuccaauuu

SEQ ID NO: 34461 - RNA, 21 nt, Artificial Sequence
  RPE65 RNA guide
ucccaugugaguuuucaccuc

SEQ ID NO: 34462 - RNA, 21 nt, Artificial Sequence
  RPE65 RNA guide
ucccucguauccaugcagaca

SEQ ID NO: 34463 - RNA, 21 nt, Artificial Sequence
  RPE65 RNA guide
uccuaggcaagucaugucugu

SEQ ID NO: 34464 - RNA, 21 nt, Artificial Sequence
  RPE65 RNA guide
uccucaaaguagggccuagcu

SEQ ID NO: 34465 - RNA, 21 nt, Artificial Sequence
  RPE65 RNA guide
uccucccaugugaguuuucac

SEQ ID NO: 34466 - RNA, 21 nt, Artificial Sequence
  RPE65 RNA guide
uccuccucaaaguagggccua

SEQ ID NO: 34467 - RNA, 21 nt, Artificial Sequence
  RPE65 RNA guide
uccuccucccaugugaguuuu

SEQ ID NO: 34468 - RNA, 21 nt, Artificial Sequence
  RPE65 RNA guide
uccuccuccucaaaguagggc

SEQ ID NO: 34469 - RNA, 21 nt, Artificial Sequence
  RPE65 RNA guide
uccugaguucagaggugaaaa

SEQ ID NO: 34470 - RNA, 21 nt, Artificial Sequence
  RPE65 RNA guide
uccuuuauuccaugauaaugu

SEQ ID NO: 34471 - RNA, 21 nt, Artificial Sequence
  RPE65 RNA guide
ucguauccaugcagacacacu

SEQ ID NO: 34472 - RNA, 21 nt, Artificial Sequence
  RPE65 RNA guide
ucucacaauguaccugggcca

SEQ ID NO: 34473 - RNA, 21 nt, Artificial Sequence
  RPE65 RNA guide
ucuccuuuauuccaugauaau

SEQ ID NO: 34474 - RNA, 21 nt, Artificial Sequence
  RPE65 RNA guide
ucugaacucaggaggcaaccu

SEQ ID NO: 34475 - RNA, 21 nt, Artificial Sequence
  RPE65 RNA guide
ucugcauggauacgagggaac

SEQ ID NO: 34476 - RNA, 21 nt, Artificial Sequence
  RPE65 RNA guide
ucuguugaauacaggguuuaa

SEQ ID NO: 34477 - RNA, 21 nt, Artificial Sequence
  RPE65 RNA guide
ucuucucacaauguaccuggg

SEQ ID NO: 34478 - RNA, 21 nt, Artificial Sequence
  RPE65 RNA guide
ucuugccaagguuacccuccu

SEQ ID NO: 34479 - RNA, 21 nt, Artificial Sequence
  RPE65 RNA guide
ugaaaacucacaugggaggag

SEQ ID NO: 34480 - RNA, 21 nt, Artificial Sequence
  RPE65 RNA guide
ugaacucaggaggcaaccuau

SEQ ID NO: 34481 - RNA, 21 nt, Artificial Sequence
  RPE65 RNA guide
ugaauacaggguuuaaagcca

SEQ ID NO: 34482 - RNA, 21 nt, Artificial Sequence
  RPE65 RNA guide
ugaccuccaauucuugguuuu

SEQ ID NO: 34483 - RNA, 21 nt, Artificial Sequence
  RPE65 RNA guide
ugacuugccuaggaggguaac

SEQ ID NO: 34484 - RNA, 21 nt, Artificial Sequence
  RPE65 RNA guide
ugagaagaaaguggguauaua

SEQ ID NO: 34485 - RNA, 21 nt, Artificial Sequence
  RPE65 RNA guide
ugaggaggaggaguggcaugg

SEQ ID NO: 34486 - RNA, 21 nt, Artificial Sequence
  RPE65 RNA guide
ugaguggcuuuaaacccugua

SEQ ID NO: 34487 - RNA, 21 nt, Artificial Sequence
  RPE65 RNA guide
ugaguucagaggugaaaacuc

SEQ ID NO: 34488 - RNA, 21 nt, Artificial Sequence
  RPE65 RNA guide
ugaguuuucaccucugaacuc

SEQ ID NO: 34489 - RNA, 21 nt, Artificial Sequence
  RPE65 RNA guide
ugauaauguucccucguaucc

SEQ ID NO: 34490 - RNA, 21 nt, Artificial Sequence
  RPE65 RNA guide
ugcagacacacuggcccaggu

SEQ ID NO: 34491 - RNA, 21 nt, Artificial Sequence
  RPE65 RNA guide
ugcauggauacgagggaacau

SEQ ID NO: 34492 - RNA, 21 nt, Artificial Sequence
  RPE65 RNA guide
ugccaagguuacccuccuagg

SEQ ID NO: 34493 - RNA, 21 nt, Artificial Sequence
  RPE65 RNA guide
ugccacuccuccuccucaaag

SEQ ID NO: 34494 - RNA, 21 nt, Artificial Sequence
  RPE65 RNA guide
ugccuaggaggguaaccuugg

SEQ ID NO: 34495 - RNA, 21 nt, Artificial Sequence
  RPE65 RNA guide
ugccuccugaguucagaggug

SEQ ID NO: 34496 - RNA, 21 nt, Artificial Sequence
  RPE65 RNA guide
ugcgcucucauuuaaugcuug

SEQ ID NO: 34497 - RNA, 21 nt, Artificial Sequence
  RPE65 RNA guide
ugcuagacacugcgcucucau

SEQ ID NO: 34498 - RNA, 21 nt, Artificial Sequence
  RPE65 RNA guide
uggaaaggccacugggaaagg

SEQ ID NO: 34499 - RNA, 21 nt, Artificial Sequence
  RPE65 RNA guide
uggaauaaaggagaagcuaaa

SEQ ID NO: 34500 - RNA, 21 nt, Artificial Sequence
  RPE65 RNA guide
uggaccccaaagcccuaggcu

SEQ ID NO: 34501 - RNA, 21 nt, Artificial Sequence
  RPE65 RNA guide
uggaggucaacaucuugccaa

SEQ ID NO: 34502 - RNA, 21 nt, Artificial Sequence
  RPE65 RNA guide
uggauacgagggaacauuauc

SEQ ID NO: 34503 - RNA, 21 nt, Artificial Sequence
  RPE65 RNA guide
uggcaagauguugaccuccaa

SEQ ID NO: 34504 - RNA, 21 nt, Artificial Sequence
  RPE65 RNA guide
uggccaucuugauuccuuuuu

SEQ ID NO: 34505 - RNA, 21 nt, Artificial Sequence
  RPE65 RNA guide
uggcccagguacauugugaga

SEQ ID NO: 34506 - RNA, 21 nt, Artificial Sequence
  RPE65 RNA guide
uggcuccuccucccaugugag

SEQ ID NO: 34507 - RNA, 21 nt, Artificial Sequence
  RPE65 RNA guide
uggcuuuaaacccuguauuca

SEQ ID NO: 34508 - RNA, 21 nt, Artificial Sequence
  RPE65 RNA guide
ugggagaaauaauagaaucua

SEQ ID NO: 34509 - RNA, 21 nt, Artificial Sequence
  RPE65 RNA guide
ugggaggaggagccaagcuag

SEQ ID NO: 34510 - RNA, 21 nt, Artificial Sequence
  RPE65 RNA guide
ugggccagugugucugcaugg

SEQ ID NO: 34511 - RNA, 21 nt, Artificial Sequence
  RPE65 RNA guide
ugggguccaacaugaguggcu

SEQ ID NO: 34512 - RNA, 21 nt, Artificial Sequence
  RPE65 RNA guide
uggguauauagguugccuccu

SEQ ID NO: 34513 - RNA, 21 nt, Artificial Sequence
  RPE65 RNA guide
uguaccugggccagugugucu

SEQ ID NO: 34514 - RNA, 21 nt, Artificial Sequence
  RPE65 RNA guide
uguauucaacagacaugacuu

SEQ ID NO: 34515 - RNA, 21 nt, Artificial Sequence
  RPE65 RNA guide
ugucugcauggauacgaggga

SEQ ID NO: 34516 - RNA, 21 nt, Artificial Sequence
  RPE65 RNA guide
ugucuguugaauacaggguuu

SEQ ID NO: 34517 - RNA, 21 nt, Artificial Sequence
  RPE65 RNA guide
ugugagaagaaaguggguaua

SEQ ID NO: 34518 - RNA, 21 nt, Artificial Sequence
  RPE65 RNA guide
ugugaguuuucaccucugaac

SEQ ID NO: 34519 - RNA, 21 nt, Artificial Sequence
  RPE65 RNA guide
ugugucugcauggauacgagg

SEQ ID NO: 34520 - RNA, 21 nt, Artificial Sequence
  RPE65 RNA guide
uguucccucguauccaugcag

SEQ ID NO: 34521 - RNA, 21 nt, Artificial Sequence
  RPE65 RNA guide
uguugaauacaggguuuaaag

SEQ ID NO: 34522 - RNA, 21 nt, Artificial Sequence
  RPE65 RNA guide
uguugaccuccaauucuuggu

SEQ ID NO: 34523 - RNA, 21 nt, Artificial Sequence
  RPE65 RNA guide
uguuggaccccaaagcccuag

SEQ ID NO: 34524 - RNA, 21 nt, Artificial Sequence
  RPE65 RNA guide
uuaaaccauuggccaucuuga

SEQ ID NO: 34525 - RNA, 21 nt, Artificial Sequence
  RPE65 RNA guide
uuaaacccuguauucaacaga

SEQ ID NO: 34526 - RNA, 21 nt, Artificial Sequence
  RPE65 RNA guide
uuaaagccacucauguuggac

SEQ ID NO: 34527 - RNA, 21 nt, Artificial Sequence
  RPE65 RNA guide
uuacaagcauuaaaugagagc

SEQ ID NO: 34528 - RNA, 21 nt, Artificial Sequence
  RPE65 RNA guide
uuacccuccuaggcaagucau

SEQ ID NO: 34529 - RNA, 21 nt, Artificial Sequence
  RPE65 RNA guide
uuagcuucuccuuuauuccau

SEQ ID NO: 34530 - RNA, 21 nt, Artificial Sequence
  RPE65 RNA guide
uuauaaaaccaagaauuggag

SEQ ID NO: 34531 - RNA, 21 nt, Artificial Sequence
  RPE65 RNA guide
uuauaaaauuggaaaggccac

SEQ ID NO: 34532 - RNA, 21 nt, Artificial Sequence
  RPE65 RNA guide
uuaucauggaauaaaggagaa

SEQ ID NO: 34533 - RNA, 21 nt, Artificial Sequence
  RPE65 RNA guide
uuauuaaaccauuggccaucu

SEQ ID NO: 34534 - RNA, 21 nt, Artificial Sequence
  RPE65 RNA guide
uuauuaugaagugcuuugugu

SEQ ID NO: 34535 - RNA, 21 nt, Artificial Sequence
  RPE65 RNA guide
uuauuccaugauaauguuccc

SEQ ID NO: 34536 - RNA, 21 nt, Artificial Sequence
  RPE65 RNA guide
uucaacagacaugacuugccu

SEQ ID NO: 34537 - RNA, 21 nt, Artificial Sequence
  RPE65 RNA guide
uucaccucugaacucaggagg

SEQ ID NO: 34538 - RNA, 21 nt, Artificial Sequence
  RPE65 RNA guide
uucagaggugaaaacucacau

SEQ ID NO: 34539 - RNA, 21 nt, Artificial Sequence
  RPE65 RNA guide
uucauuacaagcauuaaauga

SEQ ID NO: 34540 - RNA, 21 nt, Artificial Sequence
  RPE65 RNA guide
uuccaugauaauguucccucg

SEQ ID NO: 34541 - RNA, 21 nt, Artificial Sequence
  RPE65 RNA guide
uucccaguggccuuuccaauu

SEQ ID NO: 34542 - RNA, 21 nt, Artificial Sequence
  RPE65 RNA guide
uucccucguauccaugcagac

SEQ ID NO: 34543 - RNA, 21 nt, Artificial Sequence
  RPE65 RNA guide
uucucacaauguaccugggcc

SEQ ID NO: 34544 - RNA, 21 nt, Artificial Sequence
  RPE65 RNA guide
uucuucucacaauguaccugg

SEQ ID NO: 34545 - RNA, 21 nt, Artificial Sequence
  RPE65 RNA guide
uugaauacaggguuuaaagcc

SEQ ID NO: 34546 - RNA, 21 nt, Artificial Sequence
  RPE65 RNA guide
uugaccuccaauucuugguuu

SEQ ID NO: 34547 - RNA, 21 nt, Artificial Sequence
  RPE65 RNA guide
uugaggaggaggaguggcaug

SEQ ID NO: 34548 - RNA, 21 nt, Artificial Sequence
  RPE65 RNA guide
uugccaagguuacccuccuag

SEQ ID NO: 34549 - RNA, 21 nt, Artificial Sequence
  RPE65 RNA guide
uugccuaggaggguaaccuug

SEQ ID NO: 34550 - RNA, 21 nt, Artificial Sequence
  RPE65 RNA guide
uugccuccugaguucagaggu

SEQ ID NO: 34551 - RNA, 21 nt, Artificial Sequence
  RPE65 RNA guide
uuggaaaggccacugggaaag

SEQ ID NO: 34552 - RNA, 21 nt, Artificial Sequence
  RPE65 RNA guide
uuggaccccaaagcccuaggc

SEQ ID NO: 34553 - RNA, 21 nt, Artificial Sequence
  RPE65 RNA guide
uuggaggucaacaucuugcca

SEQ ID NO: 34554 - RNA, 21 nt, Artificial Sequence
  RPE65 RNA guide
uuggcaagauguugaccucca

SEQ ID NO: 34555 - RNA, 21 nt, Artificial Sequence
  RPE65 RNA guide
uuggccaucuugauuccuuuu

SEQ ID NO: 34556 - RNA, 21 nt, Artificial Sequence
  RPE65 RNA guide
uuggcuccuccucccauguga

SEQ ID NO: 34557 - RNA, 21 nt, Artificial Sequence
  RPE65 RNA guide
uugggguccaacaugaguggc

SEQ ID NO: 34558 - RNA, 21 nt, Artificial Sequence
  RPE65 RNA guide
uugugagaagaaaguggguau

SEQ ID NO: 34559 - RNA, 21 nt, Artificial Sequence
  RPE65 RNA guide
uuuaaacccuguauucaacag

SEQ ID NO: 34560 - RNA, 21 nt, Artificial Sequence
  RPE65 RNA guide
uuuaaagccacucauguugga

SEQ ID NO: 34561 - RNA, 21 nt, Artificial Sequence
  RPE65 RNA guide
uuuagcuucuccuuuauucca

SEQ ID NO: 34562 - RNA, 21 nt, Artificial Sequence
  RPE65 RNA guide
uuuauaaaauuggaaaggcca

SEQ ID NO: 34563 - RNA, 21 nt, Artificial Sequence
  RPE65 RNA guide
uuuauuccaugauaauguucc

SEQ ID NO: 34564 - RNA, 21 nt, Artificial Sequence
  RPE65 RNA guide
uuucaccucugaacucaggag

SEQ ID NO: 34565 - RNA, 21 nt, Artificial Sequence
  RPE65 RNA guide
uuucccaguggccuuuccaau

SEQ ID NO: 34566 - RNA, 21 nt, Artificial Sequence
  RPE65 RNA guide
uuucuucucacaauguaccug

SEQ ID NO: 34567 - RNA, 21 nt, Artificial Sequence
  RPE65 RNA guide
uuugaggaggaggaguggcau

SEQ ID NO: 34568 - RNA, 21 nt, Artificial Sequence
  RPE65 RNA guide
uuugggguccaacaugagugg

SEQ ID NO: 34569 - RNA, 21 nt, Artificial Sequence
  RPE65 RNA guide
uuuuauaaaauuggaaaggcc

SEQ ID NO: 34570 - RNA, 21 nt, Artificial Sequence
  RPE65 RNA guide
uuuucaccucugaacucagga

SEQ ID NO: 34571 - RNA, 22 nt, Artificial Sequence
  RPE65 RNA guide
aaaaagaaaaaggaaucaagau

SEQ ID NO: 34572 - RNA, 22 nt, Artificial Sequence
  RPE65 RNA guide
aaaaaggaaucaagauggccaa

SEQ ID NO: 34573 - RNA, 22 nt, Artificial Sequence
  RPE65 RNA guide
aaaaccaagaauuggaggucaa

SEQ ID NO: 34574 - RNA, 22 nt, Artificial Sequence
  RPE65 RNA guide
aaaacucacaugggaggaggag

SEQ ID NO: 34575 - RNA, 22 nt, Artificial Sequence
  RPE65 RNA guide
aaaagaaaaaggaaucaagaug

SEQ ID NO: 34576 - RNA, 22 nt, Artificial Sequence
  RPE65 RNA guide
aaaaggaaucaagauggccaau

SEQ ID NO: 34577 - RNA, 22 nt, Artificial Sequence
  RPE65 RNA guide
aaaauuggaaaggccacuggga

SEQ ID NO: 34578 - RNA, 22 nt, Artificial Sequence
  RPE65 RNA guide
aaaccaagaauuggaggucaac

SEQ ID NO: 34579 - RNA, 22 nt, Artificial Sequence
  RPE65 RNA guide
aaaccauuggccaucuugauuc

SEQ ID NO: 34580 - RNA, 22 nt, Artificial Sequence
  RPE65 RNA guide
aaacccuguauucaacagacau

SEQ ID NO: 34581 - RNA, 22 nt, Artificial Sequence
  RPE65 RNA guide
aaacucacaugggaggaggagc

SEQ ID NO: 34582 - RNA, 22 nt, Artificial Sequence
  RPE65 RNA guide
aaagaaaaaggaaucaagaugg

SEQ ID NO: 34583 - RNA, 22 nt, Artificial Sequence
  RPE65 RNA guide
aaagcagcacuccaugccacuc

SEQ ID NO: 34584 - RNA, 22 nt, Artificial Sequence
  RPE65 RNA guide
aaagccacucauguuggacccc

SEQ ID NO: 34585 - RNA, 22 nt, Artificial Sequence
  RPE65 RNA guide
aaagcccuaggcuuuagcuucu

SEQ ID NO: 34586 - RNA, 22 nt, Artificial Sequence
  RPE65 RNA guide
aaagccuagggcuuuggggucc

SEQ ID NO: 34587 - RNA, 22 nt, Artificial Sequence
  RPE65 RNA guide
aaaggaaucaagauggccaaug

SEQ ID NO: 34588 - RNA, 22 nt, Artificial Sequence
  RPE65 RNA guide
aaaggagaagcuaaagccuagg

SEQ ID NO: 34589 - RNA, 22 nt, Artificial Sequence
  RPE65 RNA guide
aaaguagggccuagcuuggcuc

SEQ ID NO: 34590 - RNA, 22 nt, Artificial Sequence
  RPE65 RNA guide
aaaguggguauauagguugccu

SEQ ID NO: 34591 - RNA, 22 nt, Artificial Sequence
  RPE65 RNA guide
aaaugggagaaauaauagaauc

SEQ ID NO: 34592 - RNA, 22 nt, Artificial Sequence
  RPE65 RNA guide
aaauuggaaaggccacugggaa

SEQ ID NO: 34593 - RNA, 22 nt, Artificial Sequence
  RPE65 RNA guide
aacagacaugacuugccuagga

SEQ ID NO: 34594 - RNA, 22 nt, Artificial Sequence
  RPE65 RNA guide
aacaucuugccaagguuacccu

SEQ ID NO: 34595 - RNA, 22 nt, Artificial Sequence
  RPE65 RNA guide
aacaugaguggcuuuaaacccu

SEQ ID NO: 34596 - RNA, 22 nt, Artificial Sequence
  RPE65 RNA guide
aacauuaucauggaauaaagga

SEQ ID NO: 34597 - RNA, 22 nt, Artificial Sequence
  RPE65 RNA guide
aaccaagaauuggaggucaaca

SEQ ID NO: 34598 - RNA, 22 nt, Artificial Sequence
  RPE65 RNA guide
aaccauuggccaucuugauucc

SEQ ID NO: 34599 - RNA, 22 nt, Artificial Sequence
  RPE65 RNA guide
aacccuguauucaacagacaug

SEQ ID NO: 34600 - RNA, 22 nt, Artificial Sequence
  RPE65 RNA guide
aaccuauauacccacuuucuuc

SEQ ID NO: 34601 - RNA, 22 nt, Artificial Sequence
  RPE65 RNA guide
aaccuuggcaagauguugaccu

SEQ ID NO: 34602 - RNA, 22 nt, Artificial Sequence
  RPE65 RNA guide
aacucacaugggaggaggagcc

SEQ ID NO: 34603 - RNA, 22 nt, Artificial Sequence
  RPE65 RNA guide
aacucaggaggcaaccuauaua

SEQ ID NO: 34604 - RNA, 22 nt, Artificial Sequence
  RPE65 RNA guide
aagaaaaaggaaucaagauggc

SEQ ID NO: 34605 - RNA, 22 nt, Artificial Sequence
  RPE65 RNA guide
aagaaaguggguauauagguug

SEQ ID NO: 34606 - RNA, 22 nt, Artificial Sequence
  RPE65 RNA guide
aagaauuggaggucaacaucuu

SEQ ID NO: 34607 - RNA, 22 nt, Artificial Sequence
  RPE65 RNA guide
aagauguugaccuccaauucuu

SEQ ID NO: 34608 - RNA, 22 nt, Artificial Sequence
  RPE65 RNA guide
aagcagcacuccaugccacucc

SEQ ID NO: 34609 - RNA, 22 nt, Artificial Sequence
  RPE65 RNA guide
aagcauuaaaugagagcgcagu

SEQ ID NO: 34610 - RNA, 22 nt, Artificial Sequence
  RPE65 RNA guide
aagccacucauguuggacccca

SEQ ID NO: 34611 - RNA, 22 nt, Artificial Sequence
  RPE65 RNA guide
aagcccuaggcuuuagcuucuc

SEQ ID NO: 34612 - RNA, 22 nt, Artificial Sequence
  RPE65 RNA guide
aagccuagggcuuuggggucca

SEQ ID NO: 34613 - RNA, 22 nt, Artificial Sequence
  RPE65 RNA guide
aagcuaaagccuagggcuuugg

SEQ ID NO: 34614 - RNA, 22 nt, Artificial Sequence
  RPE65 RNA guide
aagcuaggcccuacuuugagga

SEQ ID NO: 34615 - RNA, 22 nt, Artificial Sequence
  RPE65 RNA guide
aaggaaucaagauggccaaugg

SEQ ID NO: 34616 - RNA, 22 nt, Artificial Sequence
  RPE65 RNA guide
aaggagaagcuaaagccuaggg

SEQ ID NO: 34617 - RNA, 22 nt, Artificial Sequence
  RPE65 RNA guide
aagguagauucuauuauuucuc

SEQ ID NO: 34618 - RNA, 22 nt, Artificial Sequence
  RPE65 RNA guide
aagguuacccuccuaggcaagu

SEQ ID NO: 34619 - RNA, 22 nt, Artificial Sequence
  RPE65 RNA guide
aaguagggccuagcuuggcucc

SEQ ID NO: 34620 - RNA, 22 nt, Artificial Sequence
  RPE65 RNA guide
aagucaugucuguugaauacag

SEQ ID NO: 34621 - RNA, 22 nt, Artificial Sequence
  RPE65 RNA guide
aaguggguauauagguugccuc

SEQ ID NO: 34622 - RNA, 22 nt, Artificial Sequence
  RPE65 RNA guide
aauaaaggagaagcuaaagccu

SEQ ID NO: 34623 - RNA, 22 nt, Artificial Sequence
  RPE65 RNA guide
aauacaggguuuaaagccacuc

SEQ ID NO: 34624 - RNA, 22 nt, Artificial Sequence
  RPE65 RNA guide
aaucaagauggccaaugguuua

SEQ ID NO: 34625 - RNA, 22 nt, Artificial Sequence
  RPE65 RNA guide
aaugggagaaauaauagaaucu

SEQ ID NO: 34626 - RNA, 22 nt, Artificial Sequence
  RPE65 RNA guide
aauguaccugggccaguguguc

SEQ ID NO: 34627 - RNA, 22 nt, Artificial Sequence
  RPE65 RNA guide
aauguucccucguauccaugca

SEQ ID NO: 34628 - RNA, 22 nt, Artificial Sequence
  RPE65 RNA guide
aauuauaaaaccaagaauugga

SEQ ID NO: 34629 - RNA, 22 nt, Artificial Sequence
  RPE65 RNA guide
aauuggaaaggccacugggaaa

SEQ ID NO: 34630 - RNA, 22 nt, Artificial Sequence
  RPE65 RNA guide
aauuggaggucaacaucuugcc

SEQ ID NO: 34631 - RNA, 22 nt, Artificial Sequence
  RPE65 RNA guide
acaagcauuaaaugagagcgca

SEQ ID NO: 34632 - RNA, 22 nt, Artificial Sequence
  RPE65 RNA guide
acaauguaccugggccagugug

SEQ ID NO: 34633 - RNA, 22 nt, Artificial Sequence
  RPE65 RNA guide
acacaaagcacuucauaauaau

SEQ ID NO: 34634 - RNA, 22 nt, Artificial Sequence
  RPE65 RNA guide
acacacaaagcacuucauaaua

SEQ ID NO: 34635 - RNA, 22 nt, Artificial Sequence
  RPE65 RNA guide
acacacuggcccagguacauug

SEQ ID NO: 34636 - RNA, 22 nt, Artificial Sequence
  RPE65 RNA guide
acacugcgcucucauuuaaugc

SEQ ID NO: 34637 - RNA, 22 nt, Artificial Sequence
  RPE65 RNA guide
acacuggcccagguacauugug

SEQ ID NO: 34638 - RNA, 22 nt, Artificial Sequence
  RPE65 RNA guide
acagacaugacuugccuaggag

SEQ ID NO: 34639 - RNA, 22 nt, Artificial Sequence
  RPE65 RNA guide
acaggguuuaaagccacucaug

SEQ ID NO: 34640 - RNA, 22 nt, Artificial Sequence
  RPE65 RNA guide
acaucuugccaagguuacccuc

SEQ ID NO: 34641 - RNA, 22 nt, Artificial Sequence
  RPE65 RNA guide
acaugacuugccuaggagggua

SEQ ID NO: 34642 - RNA, 22 nt, Artificial Sequence
  RPE65 RNA guide
acaugaguggcuuuaaacccug

SEQ ID NO: 34643 - RNA, 22 nt, Artificial Sequence
  RPE65 RNA guide
acaugggaggaggagccaagcu

SEQ ID NO: 34644 - RNA, 22 nt, Artificial Sequence
  RPE65 RNA guide
acauuaucauggaauaaaggag

SEQ ID NO: 34645 - RNA, 22 nt, Artificial Sequence
  RPE65 RNA guide
acauugugagaagaaagugggu

SEQ ID NO: 34646 - RNA, 22 nt, Artificial Sequence
  RPE65 RNA guide
accaagaauuggaggucaacau

SEQ ID NO: 34647 - RNA, 22 nt, Artificial Sequence
  RPE65 RNA guide
accauuggccaucuugauuccu

SEQ ID NO: 34648 - RNA, 22 nt, Artificial Sequence
  RPE65 RNA guide
acccacuuucuucucacaaugu

SEQ ID NO: 34649 - RNA, 22 nt, Artificial Sequence
  RPE65 RNA guide
accccaaagcccuaggcuuuag

SEQ ID NO: 34650 - RNA, 22 nt, Artificial Sequence
  RPE65 RNA guide
accccuuucccaguggccuuuc

SEQ ID NO: 34651 - RNA, 22 nt, Artificial Sequence
  RPE65 RNA guide
acccuccuaggcaagucauguc

SEQ ID NO: 34652 - RNA, 22 nt, Artificial Sequence
  RPE65 RNA guide
acccuguauucaacagacauga

SEQ ID NO: 34653 - RNA, 22 nt, Artificial Sequence
  RPE65 RNA guide
accuauauacccacuuucuucu

SEQ ID NO: 34654 - RNA, 22 nt, Artificial Sequence
  RPE65 RNA guide
accucugaacucaggaggcaac

SEQ ID NO: 34655 - RNA, 22 nt, Artificial Sequence
  RPE65 RNA guide
accugggccagugugucugcau

SEQ ID NO: 34656 - RNA, 22 nt, Artificial Sequence
  RPE65 RNA guide
accuuggcaagauguugaccuc

SEQ ID NO: 34657 - RNA, 22 nt, Artificial Sequence
  RPE65 RNA guide
acgagggaacauuaucauggaa

SEQ ID NO: 34658 - RNA, 22 nt, Artificial Sequence
  RPE65 RNA guide
acucacaugggaggaggagcca

SEQ ID NO: 34659 - RNA, 22 nt, Artificial Sequence
  RPE65 RNA guide
acucaggaggcaaccuauauac

SEQ ID NO: 34660 - RNA, 22 nt, Artificial Sequence
  RPE65 RNA guide
acucauguuggaccccaaagcc

SEQ ID NO: 34661 - RNA, 22 nt, Artificial Sequence
  RPE65 RNA guide
acuccaugccacuccuccuccu

SEQ ID NO: 34662 - RNA, 22 nt, Artificial Sequence
  RPE65 RNA guide
acuccuccuccucaaaguaggg

SEQ ID NO: 34663 - RNA, 22 nt, Artificial Sequence
  RPE65 RNA guide
acugcgcucucauuuaaugcuu

SEQ ID NO: 34664 - RNA, 22 nt, Artificial Sequence
  RPE65 RNA guide
acuggcccagguacauugugag

SEQ ID NO: 34665 - RNA, 22 nt, Artificial Sequence
  RPE65 RNA guide
acuugccuaggaggguaaccuu

SEQ ID NO: 34666 - RNA, 22 nt, Artificial Sequence
  RPE65 RNA guide
acuuucuucucacaauguaccu

SEQ ID NO: 34667 - RNA, 22 nt, Artificial Sequence
  RPE65 RNA guide
acuuugaggaggaggaguggca

SEQ ID NO: 34668 - RNA, 22 nt, Artificial Sequence
  RPE65 RNA guide
agaaaaaggaaucaagauggcc

SEQ ID NO: 34669 - RNA, 22 nt, Artificial Sequence
  RPE65 RNA guide
agaaaguggguauauagguugc

SEQ ID NO: 34670 - RNA, 22 nt, Artificial Sequence
  RPE65 RNA guide
agaagaaaguggguauauaggu

SEQ ID NO: 34671 - RNA, 22 nt, Artificial Sequence
  RPE65 RNA guide
agaagcuaaagccuagggcuuu

SEQ ID NO: 34672 - RNA, 22 nt, Artificial Sequence
  RPE65 RNA guide
agaauuggaggucaacaucuug

SEQ ID NO: 34673 - RNA, 22 nt, Artificial Sequence
  RPE65 RNA guide
agacacacuggcccagguacau

SEQ ID NO: 34674 - RNA, 22 nt, Artificial Sequence
  RPE65 RNA guide
agacacugcgcucucauuuaau

SEQ ID NO: 34675 - RNA, 22 nt, Artificial Sequence
  RPE65 RNA guide
agacaugacuugccuaggaggg

SEQ ID NO: 34676 - RNA, 22 nt, Artificial Sequence
  RPE65 RNA guide
agaggugaaaacucacauggga

SEQ ID NO: 34677 - RNA, 22 nt, Artificial Sequence
  RPE65 RNA guide
agauguugaccuccaauucuug

SEQ ID NO: 34678 - RNA, 22 nt, Artificial Sequence
  RPE65 RNA guide
agcacuccaugccacuccuccu

SEQ ID NO: 34679 - RNA, 22 nt, Artificial Sequence
  RPE65 RNA guide
agcacuucauaauaauagcuau

SEQ ID NO: 34680 - RNA, 22 nt, Artificial Sequence
  RPE65 RNA guide
agcagcacuccaugccacuccu

SEQ ID NO: 34681 - RNA, 22 nt, Artificial Sequence
  RPE65 RNA guide
agcauuaaaugagagcgcagug

SEQ ID NO: 34682 - RNA, 22 nt, Artificial Sequence
  RPE65 RNA guide
agccaagcuaggcccuacuuug

SEQ ID NO: 34683 - RNA, 22 nt, Artificial Sequence
  RPE65 RNA guide
agccacucauguuggaccccaa

SEQ ID NO: 34684 - RNA, 22 nt, Artificial Sequence
  RPE65 RNA guide
agcccuaggcuuuagcuucucc

SEQ ID NO: 34685 - RNA, 22 nt, Artificial Sequence
  RPE65 RNA guide
agccuagggcuuugggguccaa

SEQ ID NO: 34686 - RNA, 22 nt, Artificial Sequence
  RPE65 RNA guide
agcuaaagccuagggcuuuggg

SEQ ID NO: 34687 - RNA, 22 nt, Artificial Sequence
  RPE65 RNA guide
agcuaggcccuacuuugaggag

SEQ ID NO: 34688 - RNA, 22 nt, Artificial Sequence
  RPE65 RNA guide
agcuauuauuaugaagugcuuu

SEQ ID NO: 34689 - RNA, 22 nt, Artificial Sequence
  RPE65 RNA guide
agcuucuccuuuauuccaugau

SEQ ID NO: 34690 - RNA, 22 nt, Artificial Sequence
  RPE65 RNA guide
agcuuggcuccuccucccaugu

SEQ ID NO: 34691 - RNA, 22 nt, Artificial Sequence
  RPE65 RNA guide
aggaaucaagauggccaauggu

SEQ ID NO: 34692 - RNA, 22 nt, Artificial Sequence
  RPE65 RNA guide
aggagaagcuaaagccuagggc

SEQ ID NO: 34693 - RNA, 22 nt, Artificial Sequence
  RPE65 RNA guide
aggagccaagcuaggcccuacu

SEQ ID NO: 34694 - RNA, 22 nt, Artificial Sequence
  RPE65 RNA guide
aggaggagccaagcuaggcccu

SEQ ID NO: 34695 - RNA, 22 nt, Artificial Sequence
  RPE65 RNA guide
aggaggaggaguggcauggagu

SEQ ID NO: 34696 - RNA, 22 nt, Artificial Sequence
  RPE65 RNA guide
aggaggaguggcauggagugcu

SEQ ID NO: 34697 - RNA, 22 nt, Artificial Sequence
  RPE65 RNA guide
aggaggcaaccuauauacccac

SEQ ID NO: 34698 - RNA, 22 nt, Artificial Sequence
  RPE65 RNA guide
aggaggguaaccuuggcaagau

SEQ ID NO: 34699 - RNA, 22 nt, Artificial Sequence
  RPE65 RNA guide
aggaguggcauggagugcugcu

SEQ ID NO: 34700 - RNA, 22 nt, Artificial Sequence
  RPE65 RNA guide
aggcaaccuauauacccacuuu

SEQ ID NO: 34701 - RNA, 22 nt, Artificial Sequence
  RPE65 RNA guide
aggcaagucaugucuguugaau

SEQ ID NO: 34702 - RNA, 22 nt, Artificial Sequence
  RPE65 RNA guide
aggcccuacuuugaggaggagg

SEQ ID NO: 34703 - RNA, 22 nt, Artificial Sequence
  RPE65 RNA guide
aggcuuuagcuucuccuuuauu

SEQ ID NO: 34704 - RNA, 22 nt, Artificial Sequence
  RPE65 RNA guide
agggaacauuaucauggaauaa

SEQ ID NO: 34705 - RNA, 22 nt, Artificial Sequence
  RPE65 RNA guide
agggccuagcuuggcuccuccu

SEQ ID NO: 34706 - RNA, 22 nt, Artificial Sequence
  RPE65 RNA guide
agggcuuugggguccaacauga

SEQ ID NO: 34707 - RNA, 22 nt, Artificial Sequence
  RPE65 RNA guide
aggguaaccuuggcaagauguu

SEQ ID NO: 34708 - RNA, 22 nt, Artificial Sequence
  RPE65 RNA guide
aggguuuaaagccacucauguu

SEQ ID NO: 34709 - RNA, 22 nt, Artificial Sequence
  RPE65 RNA guide
agguacauugugagaagaaagu

SEQ ID NO: 34710 - RNA, 22 nt, Artificial Sequence
  RPE65 RNA guide
agguagauucuauuauuucucc

SEQ ID NO: 34711 - RNA, 22 nt, Artificial Sequence
  RPE65 RNA guide
aggucaacaucuugccaagguu

SEQ ID NO: 34712 - RNA, 22 nt, Artificial Sequence
  RPE65 RNA guide
aggugaaaacucacaugggagg

SEQ ID NO: 34713 - RNA, 22 nt, Artificial Sequence
  RPE65 RNA guide
agguuacccuccuaggcaaguc

SEQ ID NO: 34714 - RNA, 22 nt, Artificial Sequence
  RPE65 RNA guide
agguugccuccugaguucagag

SEQ ID NO: 34715 - RNA, 22 nt, Artificial Sequence
  RPE65 RNA guide
aguagggccuagcuuggcuccu

SEQ ID NO: 34716 - RNA, 22 nt, Artificial Sequence
  RPE65 RNA guide
agucaugucuguugaauacagg

SEQ ID NO: 34717 - RNA, 22 nt, Artificial Sequence
  RPE65 RNA guide
aguggccuuuccaauuuuauaa

SEQ ID NO: 34718 - RNA, 22 nt, Artificial Sequence
  RPE65 RNA guide
aguggcuuuaaacccuguauuc

SEQ ID NO: 34719 - RNA, 22 nt, Artificial Sequence
  RPE65 RNA guide
aguggguauauagguugccucc

SEQ ID NO: 34720 - RNA, 22 nt, Artificial Sequence
  RPE65 RNA guide
agugugucugcauggauacgag

SEQ ID NO: 34721 - RNA, 22 nt, Artificial Sequence
  RPE65 RNA guide
aguucagaggugaaaacucaca

SEQ ID NO: 34722 - RNA, 22 nt, Artificial Sequence
  RPE65 RNA guide
aguuuucaccucugaacucagg

SEQ ID NO: 34723 - RNA, 22 nt, Artificial Sequence
  RPE65 RNA guide
auaaaaccaagaauuggagguc

SEQ ID NO: 34724 - RNA, 22 nt, Artificial Sequence
  RPE65 RNA guide
auaaaauuggaaaggccacugg

SEQ ID NO: 34725 - RNA, 22 nt, Artificial Sequence
  RPE65 RNA guide
auaaaggagaagcuaaagccua

SEQ ID NO: 34726 - RNA, 22 nt, Artificial Sequence
  RPE65 RNA guide
auaagguagauucuauuauuuc

SEQ ID NO: 34727 - RNA, 22 nt, Artificial Sequence
  RPE65 RNA guide
auaauguucccucguauccaug

SEQ ID NO: 34728 - RNA, 22 nt, Artificial Sequence
  RPE65 RNA guide
auacaggguuuaaagccacuca

SEQ ID NO: 34729 - RNA, 22 nt, Artificial Sequence
  RPE65 RNA guide
auacccacuuucuucucacaau

SEQ ID NO: 34730 - RNA, 22 nt, Artificial Sequence
  RPE65 RNA guide
auacgagggaacauuaucaugg

SEQ ID NO: 34731 - RNA, 22 nt, Artificial Sequence
  RPE65 RNA guide
auagguugccuccugaguucag

SEQ ID NO: 34732 - RNA, 22 nt, Artificial Sequence
  RPE65 RNA guide
auauacccacuuucuucucaca

SEQ ID NO: 34733 - RNA, 22 nt, Artificial Sequence
  RPE65 RNA guide
auauagguugccuccugaguuc

SEQ ID NO: 34734 - RNA, 22 nt, Artificial Sequence
  RPE65 RNA guide
aucaagauggccaaugguuuaa

SEQ ID NO: 34735 - RNA, 22 nt, Artificial Sequence
  RPE65 RNA guide
aucauggaauaaaggagaagcu

SEQ ID NO: 34736 - RNA, 22 nt, Artificial Sequence
  RPE65 RNA guide
auccaugcagacacacuggccc

SEQ ID NO: 34737 - RNA, 22 nt, Artificial Sequence
  RPE65 RNA guide
aucuugccaagguuacccuccu

SEQ ID NO: 34738 - RNA, 22 nt, Artificial Sequence
  RPE65 RNA guide
augacuugccuaggaggguaac

SEQ ID NO: 34739 - RNA, 22 nt, Artificial Sequence
  RPE65 RNA guide
augaguggcuuuaaacccugua

SEQ ID NO: 34740 - RNA, 22 nt, Artificial Sequence
  RPE65 RNA guide
augauaauguucccucguaucc

SEQ ID NO: 34741 - RNA, 22 nt, Artificial Sequence
  RPE65 RNA guide
augcagacacacuggcccaggu

SEQ ID NO: 34742 - RNA, 22 nt, Artificial Sequence
  RPE65 RNA guide
augccacuccuccuccucaaag

SEQ ID NO: 34743 - RNA, 22 nt, Artificial Sequence
  RPE65 RNA guide
auggaauaaaggagaagcuaaa

SEQ ID NO: 34744 - RNA, 22 nt, Artificial Sequence
  RPE65 RNA guide
auggauacgagggaacauuauc

SEQ ID NO: 34745 - RNA, 22 nt, Artificial Sequence
  RPE65 RNA guide
augggagaaauaauagaaucua

SEQ ID NO: 34746 - RNA, 22 nt, Artificial Sequence
  RPE65 RNA guide
augggaggaggagccaagcuag

SEQ ID NO: 34747 - RNA, 22 nt, Artificial Sequence
  RPE65 RNA guide
auguaccugggccagugugucu

SEQ ID NO: 34748 - RNA, 22 nt, Artificial Sequence
  RPE65 RNA guide
augucuguugaauacaggguuu

SEQ ID NO: 34749 - RNA, 22 nt, Artificial Sequence
  RPE65 RNA guide
augugaguuuucaccucugaac

SEQ ID NO: 34750 - RNA, 22 nt, Artificial Sequence
  RPE65 RNA guide
auguucccucguauccaugcag

SEQ ID NO: 34751 - RNA, 22 nt, Artificial Sequence
  RPE65 RNA guide
auguugaccuccaauucuuggu

SEQ ID NO: 34752 - RNA, 22 nt, Artificial Sequence
  RPE65 RNA guide
auguuggaccccaaagcccuag

SEQ ID NO: 34753 - RNA, 22 nt, Artificial Sequence
  RPE65 RNA guide
auuaaaccauuggccaucuuga

SEQ ID NO: 34754 - RNA, 22 nt, Artificial Sequence
  RPE65 RNA guide
auuacaagcauuaaaugagagc

SEQ ID NO: 34755 - RNA, 22 nt, Artificial Sequence
  RPE65 RNA guide
auuauaaaaccaagaauuggag

SEQ ID NO: 34756 - RNA, 22 nt, Artificial Sequence
  RPE65 RNA guide
auuaucauggaauaaaggagaa

SEQ ID NO: 34757 - RNA, 22 nt, Artificial Sequence
  RPE65 RNA guide
auuauuaaaccauuggccaucu

SEQ ID NO: 34758 - RNA, 22 nt, Artificial Sequence
  RPE65 RNA guide
auuauuaugaagugcuuugugu

SEQ ID NO: 34759 - RNA, 22 nt, Artificial Sequence
  RPE65 RNA guide
auucaacagacaugacuugccu

SEQ ID NO: 34760 - RNA, 22 nt, Artificial Sequence
  RPE65 RNA guide
auucauuacaagcauuaaauga

SEQ ID NO: 34761 - RNA, 22 nt, Artificial Sequence
  RPE65 RNA guide
auuccaugauaauguucccucg

SEQ ID NO: 34762 - RNA, 22 nt, Artificial Sequence
  RPE65 RNA guide
auuggaaaggccacugggaaag

SEQ ID NO: 34763 - RNA, 22 nt, Artificial Sequence
  RPE65 RNA guide
auuggaggucaacaucuugcca

SEQ ID NO: 34764 - RNA, 22 nt, Artificial Sequence
  RPE65 RNA guide
auuggccaucuugauuccuuuu

SEQ ID NO: 34765 - RNA, 22 nt, Artificial Sequence
  RPE65 RNA guide
auugugagaagaaaguggguau

SEQ ID NO: 34766 - RNA, 22 nt, Artificial Sequence
  RPE65 RNA guide
caaagcccuaggcuuuagcuuc

SEQ ID NO: 34767 - RNA, 22 nt, Artificial Sequence
  RPE65 RNA guide
caaaguagggccuagcuuggcu

SEQ ID NO: 34768 - RNA, 22 nt, Artificial Sequence
  RPE65 RNA guide
caacagacaugacuugccuagg

SEQ ID NO: 34769 - RNA, 22 nt, Artificial Sequence
  RPE65 RNA guide
caacaucuugccaagguuaccc

SEQ ID NO: 34770 - RNA, 22 nt, Artificial Sequence
  RPE65 RNA guide
caacaugaguggcuuuaaaccc

SEQ ID NO: 34771 - RNA, 22 nt, Artificial Sequence
  RPE65 RNA guide
caaccuauauacccacuuucuu

SEQ ID NO: 34772 - RNA, 22 nt, Artificial Sequence
  RPE65 RNA guide
caagaauuggaggucaacaucu

SEQ ID NO: 34773 - RNA, 22 nt, Artificial Sequence
  RPE65 RNA guide
caagauggccaaugguuuaaua

SEQ ID NO: 34774 - RNA, 22 nt, Artificial Sequence
  RPE65 RNA guide
caagauguugaccuccaauucu

SEQ ID NO: 34775 - RNA, 22 nt, Artificial Sequence
  RPE65 RNA guide
caagcaucacaauagcuauuau

SEQ ID NO: 34776 - RNA, 22 nt, Artificial Sequence
  RPE65 RNA guide
caagcauuaaaugagagcgcag

SEQ ID NO: 34777 - RNA, 22 nt, Artificial Sequence
  RPE65 RNA guide
caagcuaggcccuacuuugagg

SEQ ID NO: 34778 - RNA, 22 nt, Artificial Sequence
  RPE65 RNA guide
caagguuacccuccuaggcaag

SEQ ID NO: 34779 - RNA, 22 nt, Artificial Sequence
  RPE65 RNA guide
caagucaugucuguugaauaca

SEQ ID NO: 34780 - RNA, 22 nt, Artificial Sequence
  RPE65 RNA guide
caauguaccugggccagugugu

SEQ ID NO: 34781 - RNA, 22 nt, Artificial Sequence
  RPE65 RNA guide
cacaaagcacuucauaauaaua

SEQ ID NO: 34782 - RNA, 22 nt, Artificial Sequence
  RPE65 RNA guide
cacaauagcuauuauuaugaag

SEQ ID NO: 34783 - RNA, 22 nt, Artificial Sequence
  RPE65 RNA guide
cacaauguaccugggccagugu

SEQ ID NO: 34784 - RNA, 22 nt, Artificial Sequence
  RPE65 RNA guide
cacacaaagcacuucauaauaa

SEQ ID NO: 34785 - RNA, 22 nt, Artificial Sequence
  RPE65 RNA guide
cacacuggcccagguacauugu

SEQ ID NO: 34786 - RNA, 22 nt, Artificial Sequence
  RPE65 RNA guide
cacaugggaggaggagccaagc

SEQ ID NO: 34787 - RNA, 22 nt, Artificial Sequence
  RPE65 RNA guide
caccucugaacucaggaggcaa

SEQ ID NO: 34788 - RNA, 22 nt, Artificial Sequence
  RPE65 RNA guide
cacucauguuggaccccaaagc

SEQ ID NO: 34789 - RNA, 22 nt, Artificial Sequence
  RPE65 RNA guide
cacuccaugccacuccuccucc

SEQ ID NO: 34790 - RNA, 22 nt, Artificial Sequence
  RPE65 RNA guide
cacuccuccuccucaaaguagg

SEQ ID NO: 34791 - RNA, 22 nt, Artificial Sequence
  RPE65 RNA guide
cacugcgcucucauuuaaugcu

SEQ ID NO: 34792 - RNA, 22 nt, Artificial Sequence
  RPE65 RNA guide
cacuggcccagguacauuguga

SEQ ID NO: 34793 - RNA, 22 nt, Artificial Sequence
  RPE65 RNA guide
cacuuucuucucacaauguacc

SEQ ID NO: 34794 - RNA, 22 nt, Artificial Sequence
  RPE65 RNA guide
cagacacacuggcccagguaca

SEQ ID NO: 34795 - RNA, 22 nt, Artificial Sequence
  RPE65 RNA guide
cagacaugacuugccuaggagg

SEQ ID NO: 34796 - RNA, 22 nt, Artificial Sequence
  RPE65 RNA guide
cagaggugaaaacucacauggg

SEQ ID NO: 34797 - RNA, 22 nt, Artificial Sequence
  RPE65 RNA guide
cagcacuccaugccacuccucc

SEQ ID NO: 34798 - RNA, 22 nt, Artificial Sequence
  RPE65 RNA guide
caggaggcaaccuauauaccca

SEQ ID NO: 34799 - RNA, 22 nt, Artificial Sequence
  RPE65 RNA guide
caggguuuaaagccacucaugu

SEQ ID NO: 34800 - RNA, 22 nt, Artificial Sequence
  RPE65 RNA guide
cagguacauugugagaagaaag

SEQ ID NO: 34801 - RNA, 22 nt, Artificial Sequence
  RPE65 RNA guide
caguggccuuuccaauuuuaua

SEQ ID NO: 34802 - RNA, 22 nt, Artificial Sequence
  RPE65 RNA guide
cagugugucugcauggauacga

SEQ ID NO: 34803 - RNA, 22 nt, Artificial Sequence
  RPE65 RNA guide
cauaauaauagcuauugugaug

SEQ ID NO: 34804 - RNA, 22 nt, Artificial Sequence
  RPE65 RNA guide
caucuugccaagguuacccucc

SEQ ID NO: 34805 - RNA, 22 nt, Artificial Sequence
  RPE65 RNA guide
caugacuugccuaggaggguaa

SEQ ID NO: 34806 - RNA, 22 nt, Artificial Sequence
  RPE65 RNA guide
caugaguggcuuuaaacccugu

SEQ ID NO: 34807 - RNA, 22 nt, Artificial Sequence
  RPE65 RNA guide
caugauaauguucccucguauc

SEQ ID NO: 34808 - RNA, 22 nt, Artificial Sequence
  RPE65 RNA guide
caugcagacacacuggcccagg

SEQ ID NO: 34809 - RNA, 22 nt, Artificial Sequence
  RPE65 RNA guide
caugccacuccuccuccucaaa

SEQ ID NO: 34810 - RNA, 22 nt, Artificial Sequence
  RPE65 RNA guide
cauggaauaaaggagaagcuaa

SEQ ID NO: 34811 - RNA, 22 nt, Artificial Sequence
  RPE65 RNA guide
cauggauacgagggaacauuau

SEQ ID NO: 34812 - RNA, 22 nt, Artificial Sequence
  RPE65 RNA guide
caugggaggaggagccaagcua

SEQ ID NO: 34813 - RNA, 22 nt, Artificial Sequence
  RPE65 RNA guide
caugucuguugaauacaggguu

SEQ ID NO: 34814 - RNA, 22 nt, Artificial Sequence
  RPE65 RNA guide
caugugaguuuucaccucugaa

SEQ ID NO: 34815 - RNA, 22 nt, Artificial Sequence
  RPE65 RNA guide
cauguuggaccccaaagcccua

SEQ ID NO: 34816 - RNA, 22 nt, Artificial Sequence
  RPE65 RNA guide
cauuaaaugagagcgcaguguc

SEQ ID NO: 34817 - RNA, 22 nt, Artificial Sequence
  RPE65 RNA guide
cauuacaagcauuaaaugagag

SEQ ID NO: 34818 - RNA, 22 nt, Artificial Sequence
  RPE65 RNA guide
cauuaucauggaauaaaggaga

SEQ ID NO: 34819 - RNA, 22 nt, Artificial Sequence
  RPE65 RNA guide
cauuggccaucuugauuccuuu

SEQ ID NO: 34820 - RNA, 22 nt, Artificial Sequence
  RPE65 RNA guide
cauugugagaagaaagugggua

SEQ ID NO: 34821 - RNA, 22 nt, Artificial Sequence
  RPE65 RNA guide
ccaaagcccuaggcuuuagcuu

SEQ ID NO: 34822 - RNA, 22 nt, Artificial Sequence
  RPE65 RNA guide
ccaacaugaguggcuuuaaacc

SEQ ID NO: 34823 - RNA, 22 nt, Artificial Sequence
  RPE65 RNA guide
ccaagaauuggaggucaacauc

SEQ ID NO: 34824 - RNA, 22 nt, Artificial Sequence
  RPE65 RNA guide
ccaagcuaggcccuacuuugag

SEQ ID NO: 34825 - RNA, 22 nt, Artificial Sequence
  RPE65 RNA guide
ccaagguuacccuccuaggcaa

SEQ ID NO: 34826 - RNA, 22 nt, Artificial Sequence
  RPE65 RNA guide
ccacucauguuggaccccaaag

SEQ ID NO: 34827 - RNA, 22 nt, Artificial Sequence
  RPE65 RNA guide
ccacuccuccuccucaaaguag

SEQ ID NO: 34828 - RNA, 22 nt, Artificial Sequence
  RPE65 RNA guide
ccacuuucuucucacaauguac

SEQ ID NO: 34829 - RNA, 22 nt, Artificial Sequence
  RPE65 RNA guide
ccagguacauugugagaagaaa

SEQ ID NO: 34830 - RNA, 22 nt, Artificial Sequence
  RPE65 RNA guide
ccaguggccuuuccaauuuuau

SEQ ID NO: 34831 - RNA, 22 nt, Artificial Sequence
  RPE65 RNA guide
ccagugugucugcauggauacg

SEQ ID NO: 34832 - RNA, 22 nt, Artificial Sequence
  RPE65 RNA guide
ccaugauaauguucccucguau

SEQ ID NO: 34833 - RNA, 22 nt, Artificial Sequence
  RPE65 RNA guide
ccaugcagacacacuggcccag

SEQ ID NO: 34834 - RNA, 22 nt, Artificial Sequence
  RPE65 RNA guide
ccaugccacuccuccuccucaa

SEQ ID NO: 34835 - RNA, 22 nt, Artificial Sequence
  RPE65 RNA guide
ccaugugaguuuucaccucuga

SEQ ID NO: 34836 - RNA, 22 nt, Artificial Sequence
  RPE65 RNA guide
ccauuggccaucuugauuccuu

SEQ ID NO: 34837 - RNA, 22 nt, Artificial Sequence
  RPE65 RNA guide
cccaaagcccuaggcuuuagcu

SEQ ID NO: 34838 - RNA, 22 nt, Artificial Sequence
  RPE65 RNA guide
cccacuuucuucucacaaugua

SEQ ID NO: 34839 - RNA, 22 nt, Artificial Sequence
  RPE65 RNA guide
cccagguacauugugagaagaa

SEQ ID NO: 34840 - RNA, 22 nt, Artificial Sequence
  RPE65 RNA guide
cccaguggccuuuccaauuuua

SEQ ID NO: 34841 - RNA, 22 nt, Artificial Sequence
  RPE65 RNA guide
cccaugugaguuuucaccucug

SEQ ID NO: 34842 - RNA, 22 nt, Artificial Sequence
  RPE65 RNA guide
ccccaaagcccuaggcuuuagc

SEQ ID NO: 34843 - RNA, 22 nt, Artificial Sequence
  RPE65 RNA guide
ccccuuucccaguggccuuucc

SEQ ID NO: 34844 - RNA, 22 nt, Artificial Sequence
  RPE65 RNA guide
cccgaccccuuucccaguggcc

SEQ ID NO: 34845 - RNA, 22 nt, Artificial Sequence
  RPE65 RNA guide
cccuacuuugaggaggaggagu

SEQ ID NO: 34846 - RNA, 22 nt, Artificial Sequence
  RPE65 RNA guide
cccuaggcuuuagcuucuccuu

SEQ ID NO: 34847 - RNA, 22 nt, Artificial Sequence
  RPE65 RNA guide
cccuccuaggcaagucaugucu

SEQ ID NO: 34848 - RNA, 22 nt, Artificial Sequence
  RPE65 RNA guide
cccucguauccaugcagacaca

SEQ ID NO: 34849 - RNA, 22 nt, Artificial Sequence
  RPE65 RNA guide
cccuguauucaacagacaugac

SEQ ID NO: 34850 - RNA, 22 nt, Artificial Sequence
  RPE65 RNA guide
cccuuucccaguggccuuucca

SEQ ID NO: 34851 - RNA, 22 nt, Artificial Sequence
  RPE65 RNA guide
ccgaccccuuucccaguggccu

SEQ ID NO: 34852 - RNA, 22 nt, Artificial Sequence
  RPE65 RNA guide
ccuacuuugaggaggaggagug

SEQ ID NO: 34853 - RNA, 22 nt, Artificial Sequence
  RPE65 RNA guide
ccuagcuuggcuccuccuccca

SEQ ID NO: 34854 - RNA, 22 nt, Artificial Sequence
  RPE65 RNA guide
ccuaggaggguaaccuuggcaa

SEQ ID NO: 34855 - RNA, 22 nt, Artificial Sequence
  RPE65 RNA guide
ccuaggcaagucaugucuguug

SEQ ID NO: 34856 - RNA, 22 nt, Artificial Sequence
  RPE65 RNA guide
ccuaggcuuuagcuucuccuuu

SEQ ID NO: 34857 - RNA, 22 nt, Artificial Sequence
  RPE65 RNA guide
ccuagggcuuugggguccaaca

SEQ ID NO: 34858 - RNA, 22 nt, Artificial Sequence
  RPE65 RNA guide
ccuauauacccacuuucuucuc

SEQ ID NO: 34859 - RNA, 22 nt, Artificial Sequence
  RPE65 RNA guide
ccucaaaguagggccuagcuug

SEQ ID NO: 34860 - RNA, 22 nt, Artificial Sequence
  RPE65 RNA guide
ccuccaauucuugguuuuauaa

SEQ ID NO: 34861 - RNA, 22 nt, Artificial Sequence
  RPE65 RNA guide
ccucccaugugaguuuucaccu

SEQ ID NO: 34862 - RNA, 22 nt, Artificial Sequence
  RPE65 RNA guide
ccuccuaggcaagucaugucug

SEQ ID NO: 34863 - RNA, 22 nt, Artificial Sequence
  RPE65 RNA guide
ccuccucaaaguagggccuagc

SEQ ID NO: 34864 - RNA, 22 nt, Artificial Sequence
  RPE65 RNA guide
ccuccucccaugugaguuuuca

SEQ ID NO: 34865 - RNA, 22 nt, Artificial Sequence
  RPE65 RNA guide
ccuccuccucaaaguagggccu

SEQ ID NO: 34866 - RNA, 22 nt, Artificial Sequence
  RPE65 RNA guide
ccuccugaguucagaggugaaa

SEQ ID NO: 34867 - RNA, 22 nt, Artificial Sequence
  RPE65 RNA guide
ccucguauccaugcagacacac

SEQ ID NO: 34868 - RNA, 22 nt, Artificial Sequence
  RPE65 RNA guide
ccucugaacucaggaggcaacc

SEQ ID NO: 34869 - RNA, 22 nt, Artificial Sequence
  RPE65 RNA guide
ccugaguucagaggugaaaacu

SEQ ID NO: 34870 - RNA, 22 nt, Artificial Sequence
  RPE65 RNA guide
ccugggccagugugucugcaug

SEQ ID NO: 34871 - RNA, 22 nt, Artificial Sequence
  RPE65 RNA guide
ccuguauucaacagacaugacu

SEQ ID NO: 34872 - RNA, 22 nt, Artificial Sequence
  RPE65 RNA guide
ccuuggcaagauguugaccucc

SEQ ID NO: 34873 - RNA, 22 nt, Artificial Sequence
  RPE65 RNA guide
ccuuuauuccaugauaauguuc

SEQ ID NO: 34874 - RNA, 22 nt, Artificial Sequence
  RPE65 RNA guide
ccuuucccaguggccuuuccaa

SEQ ID NO: 34875 - RNA, 22 nt, Artificial Sequence
  RPE65 RNA guide
cgaccccuuucccaguggccuu

SEQ ID NO: 34876 - RNA, 22 nt, Artificial Sequence
  RPE65 RNA guide
cgagggaacauuaucauggaau

SEQ ID NO: 34877 - RNA, 22 nt, Artificial Sequence
  RPE65 RNA guide
cgcucucauuuaaugcuuguaa

SEQ ID NO: 34878 - RNA, 22 nt, Artificial Sequence
  RPE65 RNA guide
cguauccaugcagacacacugg

SEQ ID NO: 34879 - RNA, 22 nt, Artificial Sequence
  RPE65 RNA guide
cuaaagccuagggcuuuggggu

SEQ ID NO: 34880 - RNA, 22 nt, Artificial Sequence
  RPE65 RNA guide
cuaauuauaaaaccaagaauug

SEQ ID NO: 34881 - RNA, 22 nt, Artificial Sequence
  RPE65 RNA guide
cuacuuugaggaggaggagugg

SEQ ID NO: 34882 - RNA, 22 nt, Artificial Sequence
  RPE65 RNA guide
cuagacacugcgcucucauuua

SEQ ID NO: 34883 - RNA, 22 nt, Artificial Sequence
  RPE65 RNA guide
cuagcuuggcuccuccucccau

SEQ ID NO: 34884 - RNA, 22 nt, Artificial Sequence
  RPE65 RNA guide
cuaggaggguaaccuuggcaag

SEQ ID NO: 34885 - RNA, 22 nt, Artificial Sequence
  RPE65 RNA guide
cuaggcaagucaugucuguuga

SEQ ID NO: 34886 - RNA, 22 nt, Artificial Sequence
  RPE65 RNA guide
cuaggcccuacuuugaggagga

SEQ ID NO: 34887 - RNA, 22 nt, Artificial Sequence
  RPE65 RNA guide
cuaggcuuuagcuucuccuuua

SEQ ID NO: 34888 - RNA, 22 nt, Artificial Sequence
  RPE65 RNA guide
cuagggcuuugggguccaacau

SEQ ID NO: 34889 - RNA, 22 nt, Artificial Sequence
  RPE65 RNA guide
cuauauacccacuuucuucuca

SEQ ID NO: 34890 - RNA, 22 nt, Artificial Sequence
  RPE65 RNA guide
cuauuauuaugaagugcuuugu

SEQ ID NO: 34891 - RNA, 22 nt, Artificial Sequence
  RPE65 RNA guide
cucaaaguagggccuagcuugg

SEQ ID NO: 34892 - RNA, 22 nt, Artificial Sequence
  RPE65 RNA guide
cucacaauguaccugggccagu

SEQ ID NO: 34893 - RNA, 22 nt, Artificial Sequence
  RPE65 RNA guide
cucacaugggaggaggagccaa

SEQ ID NO: 34894 - RNA, 22 nt, Artificial Sequence
  RPE65 RNA guide
cucaggaggcaaccuauauacc

SEQ ID NO: 34895 - RNA, 22 nt, Artificial Sequence
  RPE65 RNA guide
cucauguuggaccccaaagccc

SEQ ID NO: 34896 - RNA, 22 nt, Artificial Sequence
  RPE65 RNA guide
cuccaugccacuccuccuccuc

SEQ ID NO: 34897 - RNA, 22 nt, Artificial Sequence
  RPE65 RNA guide
cucccaugugaguuuucaccuc

SEQ ID NO: 34898 - RNA, 22 nt, Artificial Sequence
  RPE65 RNA guide
cuccuaggcaagucaugucugu

SEQ ID NO: 34899 - RNA, 22 nt, Artificial Sequence
  RPE65 RNA guide
cuccucaaaguagggccuagcu

SEQ ID NO: 34900 - RNA, 22 nt, Artificial Sequence
  RPE65 RNA guide
cuccucccaugugaguuuucac

SEQ ID NO: 34901 - RNA, 22 nt, Artificial Sequence
  RPE65 RNA guide
cuccuccucaaaguagggccua

SEQ ID NO: 34902 - RNA, 22 nt, Artificial Sequence
  RPE65 RNA guide
cuccuccucccaugugaguuuu

SEQ ID NO: 34903 - RNA, 22 nt, Artificial Sequence
  RPE65 RNA guide
cuccuccuccucaaaguagggc

SEQ ID NO: 34904 - RNA, 22 nt, Artificial Sequence
  RPE65 RNA guide
cuccugaguucagaggugaaaa

SEQ ID NO: 34905 - RNA, 22 nt, Artificial Sequence
  RPE65 RNA guide
cuccuuuauuccaugauaaugu

SEQ ID NO: 34906 - RNA, 22 nt, Artificial Sequence
  RPE65 RNA guide
cucguauccaugcagacacacu

SEQ ID NO: 34907 - RNA, 22 nt, Artificial Sequence
  RPE65 RNA guide
cucugaacucaggaggcaaccu

SEQ ID NO: 34908 - RNA, 22 nt, Artificial Sequence
  RPE65 RNA guide
cugaacucaggaggcaaccuau

SEQ ID NO: 34909 - RNA, 22 nt, Artificial Sequence
  RPE65 RNA guide
cugaguucagaggugaaaacuc

SEQ ID NO: 34910 - RNA, 22 nt, Artificial Sequence
  RPE65 RNA guide
cugcauggauacgagggaacau

SEQ ID NO: 34911 - RNA, 22 nt, Artificial Sequence
  RPE65 RNA guide
cugcgcucucauuuaaugcuug

SEQ ID NO: 34912 - RNA, 22 nt, Artificial Sequence
  RPE65 RNA guide
cuggcccagguacauugugaga

SEQ ID NO: 34913 - RNA, 22 nt, Artificial Sequence
  RPE65 RNA guide
cugggccagugugucugcaugg

SEQ ID NO: 34914 - RNA, 22 nt, Artificial Sequence
  RPE65 RNA guide
cuguauucaacagacaugacuu

SEQ ID NO: 34915 - RNA, 22 nt, Artificial Sequence
  RPE65 RNA guide
cuguugaauacaggguuuaaag

SEQ ID NO: 34916 - RNA, 22 nt, Artificial Sequence
  RPE65 RNA guide
cuucauaauaauagcuauugug

SEQ ID NO: 34917 - RNA, 22 nt, Artificial Sequence
  RPE65 RNA guide
cuucucacaauguaccugggcc

SEQ ID NO: 34918 - RNA, 22 nt, Artificial Sequence
  RPE65 RNA guide
cuucuccuuuauuccaugauaa

SEQ ID NO: 34919 - RNA, 22 nt, Artificial Sequence
  RPE65 RNA guide
cuugccaagguuacccuccuag

SEQ ID NO: 34920 - RNA, 22 nt, Artificial Sequence
  RPE65 RNA guide
cuugccuaggaggguaaccuug

SEQ ID NO: 34921 - RNA, 22 nt, Artificial Sequence
  RPE65 RNA guide
cuuggcaagauguugaccucca

SEQ ID NO: 34922 - RNA, 22 nt, Artificial Sequence
  RPE65 RNA guide
cuuggcuccuccucccauguga

SEQ ID NO: 34923 - RNA, 22 nt, Artificial Sequence
  RPE65 RNA guide
cuuuaaacccuguauucaacag

SEQ ID NO: 34924 - RNA, 22 nt, Artificial Sequence
  RPE65 RNA guide
cuuuagcuucuccuuuauucca

SEQ ID NO: 34925 - RNA, 22 nt, Artificial Sequence
  RPE65 RNA guide
cuuuauuccaugauaauguucc

SEQ ID NO: 34926 - RNA, 22 nt, Artificial Sequence
  RPE65 RNA guide
cuuucccaguggccuuuccaau

SEQ ID NO: 34927 - RNA, 22 nt, Artificial Sequence
  RPE65 RNA guide
cuuucuucucacaauguaccug

SEQ ID NO: 34928 - RNA, 22 nt, Artificial Sequence
  RPE65 RNA guide
cuuugaggaggaggaguggcau

SEQ ID NO: 34929 - RNA, 22 nt, Artificial Sequence
  RPE65 RNA guide
cuuugggguccaacaugagugg

SEQ ID NO: 34930 - RNA, 22 nt, Artificial Sequence
  RPE65 RNA guide
cuuuuuauaaaauuggaaaggc

SEQ ID NO: 34931 - RNA, 22 nt, Artificial Sequence
  RPE65 RNA guide
gaaaaaggaaucaagauggcca

SEQ ID NO: 34932 - RNA, 22 nt, Artificial Sequence
  RPE65 RNA guide
gaaaacucacaugggaggagga

SEQ ID NO: 34933 - RNA, 22 nt, Artificial Sequence
  RPE65 RNA guide
gaaaggccacugggaaaggggu

SEQ ID NO: 34934 - RNA, 22 nt, Artificial Sequence
  RPE65 RNA guide
gaaaguggguauauagguugcc

SEQ ID NO: 34935 - RNA, 22 nt, Artificial Sequence
  RPE65 RNA guide
gaacauuaucauggaauaaagg

SEQ ID NO: 34936 - RNA, 22 nt, Artificial Sequence
  RPE65 RNA guide
gaacucaggaggcaaccuauau

SEQ ID NO: 34937 - RNA, 22 nt, Artificial Sequence
  RPE65 RNA guide
gaagaaaguggguauauagguu

SEQ ID NO: 34938 - RNA, 22 nt, Artificial Sequence
  RPE65 RNA guide
gaagcuaaagccuagggcuuug

SEQ ID NO: 34939 - RNA, 22 nt, Artificial Sequence
  RPE65 RNA guide
gaauaaaggagaagcuaaagcc

SEQ ID NO: 34940 - RNA, 22 nt, Artificial Sequence
  RPE65 RNA guide
gaauacaggguuuaaagccacu

SEQ ID NO: 34941 - RNA, 22 nt, Artificial Sequence
  RPE65 RNA guide
gaaucaagauggccaaugguuu

SEQ ID NO: 34942 - RNA, 22 nt, Artificial Sequence
  RPE65 RNA guide
gaauuggaggucaacaucuugc

SEQ ID NO: 34943 - RNA, 22 nt, Artificial Sequence
  RPE65 RNA guide
gacacacuggcccagguacauu

SEQ ID NO: 34944 - RNA, 22 nt, Artificial Sequence
  RPE65 RNA guide
gacacugcgcucucauuuaaug

SEQ ID NO: 34945 - RNA, 22 nt, Artificial Sequence
  RPE65 RNA guide
gacaugacuugccuaggagggu

SEQ ID NO: 34946 - RNA, 22 nt, Artificial Sequence
  RPE65 RNA guide
gaccccaaagcccuaggcuuua

SEQ ID NO: 34947 - RNA, 22 nt, Artificial Sequence
  RPE65 RNA guide
gaccccuuucccaguggccuuu

SEQ ID NO: 34948 - RNA, 22 nt, Artificial Sequence
  RPE65 RNA guide
gaccuccaauucuugguuuuau

SEQ ID NO: 34949 - RNA, 22 nt, Artificial Sequence
  RPE65 RNA guide
gacuugccuaggaggguaaccu

SEQ ID NO: 34950 - RNA, 22 nt, Artificial Sequence
  RPE65 RNA guide
gagaagaaaguggguauauagg

SEQ ID NO: 34951 - RNA, 22 nt, Artificial Sequence
  RPE65 RNA guide
gagaagcuaaagccuagggcuu

SEQ ID NO: 34952 - RNA, 22 nt, Artificial Sequence
  RPE65 RNA guide
gagccaagcuaggcccuacuuu

SEQ ID NO: 34953 - RNA, 22 nt, Artificial Sequence
  RPE65 RNA guide
gaggagccaagcuaggcccuac

SEQ ID NO: 34954 - RNA, 22 nt, Artificial Sequence
  RPE65 RNA guide
gaggaggagccaagcuaggccc

SEQ ID NO: 34955 - RNA, 22 nt, Artificial Sequence
  RPE65 RNA guide
gaggaggaggaguggcauggag

SEQ ID NO: 34956 - RNA, 22 nt, Artificial Sequence
  RPE65 RNA guide
gaggaggaguggcauggagugc

SEQ ID NO: 34957 - RNA, 22 nt, Artificial Sequence
  RPE65 RNA guide
gaggaguggcauggagugcugc

SEQ ID NO: 34958 - RNA, 22 nt, Artificial Sequence
  RPE65 RNA guide
gaggcaaccuauauacccacuu

SEQ ID NO: 34959 - RNA, 22 nt, Artificial Sequence
  RPE65 RNA guide
gagggaacauuaucauggaaua

SEQ ID NO: 34960 - RNA, 22 nt, Artificial Sequence
  RPE65 RNA guide
gaggguaaccuuggcaagaugu

SEQ ID NO: 34961 - RNA, 22 nt, Artificial Sequence
  RPE65 RNA guide
gaggucaacaucuugccaaggu

SEQ ID NO: 34962 - RNA, 22 nt, Artificial Sequence
  RPE65 RNA guide
gaggugaaaacucacaugggag

SEQ ID NO: 34963 - RNA, 22 nt, Artificial Sequence
  RPE65 RNA guide
gaguggcuuuaaacccuguauu

SEQ ID NO: 34964 - RNA, 22 nt, Artificial Sequence
  RPE65 RNA guide
gaguucagaggugaaaacucac

SEQ ID NO: 34965 - RNA, 22 nt, Artificial Sequence
  RPE65 RNA guide
gaguuuucaccucugaacucag

SEQ ID NO: 34966 - RNA, 22 nt, Artificial Sequence
  RPE65 RNA guide
gauaauguucccucguauccau

SEQ ID NO: 34967 - RNA, 22 nt, Artificial Sequence
  RPE65 RNA guide
gauacgagggaacauuaucaug

SEQ ID NO: 34968 - RNA, 22 nt, Artificial Sequence
  RPE65 RNA guide
gauguugaccuccaauucuugg

SEQ ID NO: 34969 - RNA, 22 nt, Artificial Sequence
  RPE65 RNA guide
gcaaccuauauacccacuuucu

SEQ ID NO: 34970 - RNA, 22 nt, Artificial Sequence
  RPE65 RNA guide
gcaagauguugaccuccaauuc

SEQ ID NO: 34971 - RNA, 22 nt, Artificial Sequence
  RPE65 RNA guide
gcaagucaugucuguugaauac

SEQ ID NO: 34972 - RNA, 22 nt, Artificial Sequence
  RPE65 RNA guide
gcacuccaugccacuccuccuc

SEQ ID NO: 34973 - RNA, 22 nt, Artificial Sequence
  RPE65 RNA guide
gcacuucauaauaauagcuauu

SEQ ID NO: 34974 - RNA, 22 nt, Artificial Sequence
  RPE65 RNA guide
gcagacacacuggcccagguac

SEQ ID NO: 34975 - RNA, 22 nt, Artificial Sequence
  RPE65 RNA guide
gcagcacuccaugccacuccuc

SEQ ID NO: 34976 - RNA, 22 nt, Artificial Sequence
  RPE65 RNA guide
gcaucacaauagcuauuauuau

SEQ ID NO: 34977 - RNA, 22 nt, Artificial Sequence
  RPE65 RNA guide
gcauggauacgagggaacauua

SEQ ID NO: 34978 - RNA, 22 nt, Artificial Sequence
  RPE65 RNA guide
gcauuaaaugagagcgcagugu

SEQ ID NO: 34979 - RNA, 22 nt, Artificial Sequence
  RPE65 RNA guide
gccaagcuaggcccuacuuuga

SEQ ID NO: 34980 - RNA, 22 nt, Artificial Sequence
  RPE65 RNA guide
gccaagguuacccuccuaggca

SEQ ID NO: 34981 - RNA, 22 nt, Artificial Sequence
  RPE65 RNA guide
gccacucauguuggaccccaaa

SEQ ID NO: 34982 - RNA, 22 nt, Artificial Sequence
  RPE65 RNA guide
gccacuccuccuccucaaagua

SEQ ID NO: 34983 - RNA, 22 nt, Artificial Sequence
  RPE65 RNA guide
gccagugugucugcauggauac

SEQ ID NO: 34984 - RNA, 22 nt, Artificial Sequence
  RPE65 RNA guide
gccaucuugauuccuuuuucuu

SEQ ID NO: 34985 - RNA, 22 nt, Artificial Sequence
  RPE65 RNA guide
gcccagguacauugugagaaga

SEQ ID NO: 34986 - RNA, 22 nt, Artificial Sequence
  RPE65 RNA guide
gcccuacuuugaggaggaggag

SEQ ID NO: 34987 - RNA, 22 nt, Artificial Sequence
  RPE65 RNA guide
gcccuaggcuuuagcuucuccu

SEQ ID NO: 34988 - RNA, 22 nt, Artificial Sequence
  RPE65 RNA guide
gccuagcuuggcuccuccuccc

SEQ ID NO: 34989 - RNA, 22 nt, Artificial Sequence
  RPE65 RNA guide
gccuaggaggguaaccuuggca

SEQ ID NO: 34990 - RNA, 22 nt, Artificial Sequence
  RPE65 RNA guide
gccuagggcuuugggguccaac

SEQ ID NO: 34991 - RNA, 22 nt, Artificial Sequence
  RPE65 RNA guide
gccuccugaguucagaggugaa

SEQ ID NO: 34992 - RNA, 22 nt, Artificial Sequence
  RPE65 RNA guide
gcgcucucauuuaaugcuugua

SEQ ID NO: 34993 - RNA, 22 nt, Artificial Sequence
  RPE65 RNA guide
gcuaaagccuagggcuuugggg

SEQ ID NO: 34994 - RNA, 22 nt, Artificial Sequence
  RPE65 RNA guide
gcuagacacugcgcucucauuu

SEQ ID NO: 34995 - RNA, 22 nt, Artificial Sequence
  RPE65 RNA guide
gcuaggcccuacuuugaggagg

SEQ ID NO: 34996 - RNA, 22 nt, Artificial Sequence
  RPE65 RNA guide
gcuauuauuaugaagugcuuug

SEQ ID NO: 34997 - RNA, 22 nt, Artificial Sequence
  RPE65 RNA guide
gcuccuccucccaugugaguuu

SEQ ID NO: 34998 - RNA, 22 nt, Artificial Sequence
  RPE65 RNA guide
gcucucauuuaaugcuuguaau

SEQ ID NO: 34999 - RNA, 22 nt, Artificial Sequence
  RPE65 RNA guide
gcuucuccuuuauuccaugaua

SEQ ID NO: 35000 - RNA, 22 nt, Artificial Sequence
  RPE65 RNA guide
gcuuggcuccuccucccaugug

SEQ ID NO: 35001 - RNA, 22 nt, Artificial Sequence
  RPE65 RNA guide
gcuuuaaacccuguauucaaca

SEQ ID NO: 35002 - RNA, 22 nt, Artificial Sequence
  RPE65 RNA guide
gcuuuagcuucuccuuuauucc

SEQ ID NO: 35003 - RNA, 22 nt, Artificial Sequence
  RPE65 RNA guide
gcuuugggguccaacaugagug

SEQ ID NO: 35004 - RNA, 22 nt, Artificial Sequence
  RPE65 RNA guide
ggaaaggccacugggaaagggg

SEQ ID NO: 35005 - RNA, 22 nt, Artificial Sequence
  RPE65 RNA guide
ggaacauuaucauggaauaaag

SEQ ID NO: 35006 - RNA, 22 nt, Artificial Sequence
  RPE65 RNA guide
ggaauaaaggagaagcuaaagc

SEQ ID NO: 35007 - RNA, 22 nt, Artificial Sequence
  RPE65 RNA guide
ggaaucaagauggccaaugguu

SEQ ID NO: 35008 - RNA, 22 nt, Artificial Sequence
  RPE65 RNA guide
ggaccccaaagcccuaggcuuu

SEQ ID NO: 35009 - RNA, 22 nt, Artificial Sequence
  RPE65 RNA guide
ggagaagcuaaagccuagggcu

SEQ ID NO: 35010 - RNA, 22 nt, Artificial Sequence
  RPE65 RNA guide
ggagccaagcuaggcccuacuu

SEQ ID NO: 35011 - RNA, 22 nt, Artificial Sequence
  RPE65 RNA guide
ggaggagccaagcuaggcccua

SEQ ID NO: 35012 - RNA, 22 nt, Artificial Sequence
  RPE65 RNA guide
ggaggaggagccaagcuaggcc

SEQ ID NO: 35013 - RNA, 22 nt, Artificial Sequence
  RPE65 RNA guide
ggaggaggaguggcauggagug

SEQ ID NO: 35014 - RNA, 22 nt, Artificial Sequence
  RPE65 RNA guide
ggaggaguggcauggagugcug

SEQ ID NO: 35015 - RNA, 22 nt, Artificial Sequence
  RPE65 RNA guide
ggaggcaaccuauauacccacu

SEQ ID NO: 35016 - RNA, 22 nt, Artificial Sequence
  RPE65 RNA guide
ggaggguaaccuuggcaagaug

SEQ ID NO: 35017 - RNA, 22 nt, Artificial Sequence
  RPE65 RNA guide
ggaggucaacaucuugccaagg

SEQ ID NO: 35018 - RNA, 22 nt, Artificial Sequence
  RPE65 RNA guide
ggauacgagggaacauuaucau

SEQ ID NO: 35019 - RNA, 22 nt, Artificial Sequence
  RPE65 RNA guide
ggcaaccuauauacccacuuuc

SEQ ID NO: 35020 - RNA, 22 nt, Artificial Sequence
  RPE65 RNA guide
ggcaagauguugaccuccaauu

SEQ ID NO: 35021 - RNA, 22 nt, Artificial Sequence
  RPE65 RNA guide
ggcaagucaugucuguugaaua

SEQ ID NO: 35022 - RNA, 22 nt, Artificial Sequence
  RPE65 RNA guide
ggccagugugucugcauggaua

SEQ ID NO: 35023 - RNA, 22 nt, Artificial Sequence
  RPE65 RNA guide
ggccaucuugauuccuuuuucu

SEQ ID NO: 35024 - RNA, 22 nt, Artificial Sequence
  RPE65 RNA guide
ggcccagguacauugugagaag

SEQ ID NO: 35025 - RNA, 22 nt, Artificial Sequence
  RPE65 RNA guide
ggcccuacuuugaggaggagga

SEQ ID NO: 35026 - RNA, 22 nt, Artificial Sequence
  RPE65 RNA guide
ggccuagcuuggcuccuccucc

SEQ ID NO: 35027 - RNA, 22 nt, Artificial Sequence
  RPE65 RNA guide
ggcuccuccucccaugugaguu

SEQ ID NO: 35028 - RNA, 22 nt, Artificial Sequence
  RPE65 RNA guide
ggcuuuaaacccuguauucaac

SEQ ID NO: 35029 - RNA, 22 nt, Artificial Sequence
  RPE65 RNA guide
ggcuuuagcuucuccuuuauuc

SEQ ID NO: 35030 - RNA, 22 nt, Artificial Sequence
  RPE65 RNA guide
ggcuuugggguccaacaugagu

SEQ ID NO: 35031 - RNA, 22 nt, Artificial Sequence
  RPE65 RNA guide
gggaacauuaucauggaauaaa

SEQ ID NO: 35032 - RNA, 22 nt, Artificial Sequence
  RPE65 RNA guide
gggagaaauaauagaaucuacc

SEQ ID NO: 35033 - RNA, 22 nt, Artificial Sequence
  RPE65 RNA guide
gggaggaggagccaagcuaggc

SEQ ID NO: 35034 - RNA, 22 nt, Artificial Sequence
  RPE65 RNA guide
gggccagugugucugcauggau

SEQ ID NO: 35035 - RNA, 22 nt, Artificial Sequence
  RPE65 RNA guide
gggccuagcuuggcuccuccuc

SEQ ID NO: 35036 - RNA, 22 nt, Artificial Sequence
  RPE65 RNA guide
gggcuuugggguccaacaugag

SEQ ID NO: 35037 - RNA, 22 nt, Artificial Sequence
  RPE65 RNA guide
gggguccaacaugaguggcuuu

SEQ ID NO: 35038 - RNA, 22 nt, Artificial Sequence
  RPE65 RNA guide
ggguaaccuuggcaagauguug

SEQ ID NO: 35039 - RNA, 22 nt, Artificial Sequence
  RPE65 RNA guide
ggguauauagguugccuccuga

SEQ ID NO: 35040 - RNA, 22 nt, Artificial Sequence
  RPE65 RNA guide
ggguccaacaugaguggcuuua

SEQ ID NO: 35041 - RNA, 22 nt, Artificial Sequence
  RPE65 RNA guide
ggguuuaaagccacucauguug

SEQ ID NO: 35042 - RNA, 22 nt, Artificial Sequence
  RPE65 RNA guide
gguaaccuuggcaagauguuga

SEQ ID NO: 35043 - RNA, 22 nt, Artificial Sequence
  RPE65 RNA guide
gguacauugugagaagaaagug

SEQ ID NO: 35044 - RNA, 22 nt, Artificial Sequence
  RPE65 RNA guide
gguagauucuauuauuucuccc

SEQ ID NO: 35045 - RNA, 22 nt, Artificial Sequence
  RPE65 RNA guide
gguauauagguugccuccugag

SEQ ID NO: 35046 - RNA, 22 nt, Artificial Sequence
  RPE65 RNA guide
ggucaacaucuugccaagguua

SEQ ID NO: 35047 - RNA, 22 nt, Artificial Sequence
  RPE65 RNA guide
gguccaacaugaguggcuuuaa

SEQ ID NO: 35048 - RNA, 22 nt, Artificial Sequence
  RPE65 RNA guide
ggugaaaacucacaugggagga

SEQ ID NO: 35049 - RNA, 22 nt, Artificial Sequence
  RPE65 RNA guide
gguuacccuccuaggcaaguca

SEQ ID NO: 35050 - RNA, 22 nt, Artificial Sequence
  RPE65 RNA guide
gguugccuccugaguucagagg

SEQ ID NO: 35051 - RNA, 22 nt, Artificial Sequence
  RPE65 RNA guide
gguuuaaagccacucauguugg

SEQ ID NO: 35052 - RNA, 22 nt, Artificial Sequence
  RPE65 RNA guide
guaaagcagcacuccaugccac

SEQ ID NO: 35053 - RNA, 22 nt, Artificial Sequence
  RPE65 RNA guide
guaaccuuggcaagauguugac

SEQ ID NO: 35054 - RNA, 22 nt, Artificial Sequence
  RPE65 RNA guide
guacauugugagaagaaagugg

SEQ ID NO: 35055 - RNA, 22 nt, Artificial Sequence
  RPE65 RNA guide
guaccugggccagugugucugc

SEQ ID NO: 35056 - RNA, 22 nt, Artificial Sequence
  RPE65 RNA guide
guagggccuagcuuggcuccuc

SEQ ID NO: 35057 - RNA, 22 nt, Artificial Sequence
  RPE65 RNA guide
guauauagguugccuccugagu

SEQ ID NO: 35058 - RNA, 22 nt, Artificial Sequence
  RPE65 RNA guide
guauccaugcagacacacuggc

SEQ ID NO: 35059 - RNA, 22 nt, Artificial Sequence
  RPE65 RNA guide
guauucaacagacaugacuugc

SEQ ID NO: 35060 - RNA, 22 nt, Artificial Sequence
  RPE65 RNA guide
gucaacaucuugccaagguuac

SEQ ID NO: 35061 - RNA, 22 nt, Artificial Sequence
  RPE65 RNA guide
gucaugucuguugaauacaggg

SEQ ID NO: 35062 - RNA, 22 nt, Artificial Sequence
  RPE65 RNA guide
guccaacaugaguggcuuuaaa

SEQ ID NO: 35063 - RNA, 22 nt, Artificial Sequence
  RPE65 RNA guide
gucugcauggauacgagggaac

SEQ ID NO: 35064 - RNA, 22 nt, Artificial Sequence
  RPE65 RNA guide
gucuguugaauacaggguuuaa

SEQ ID NO: 35065 - RNA, 22 nt, Artificial Sequence
  RPE65 RNA guide
gugaaaacucacaugggaggag

SEQ ID NO: 35066 - RNA, 22 nt, Artificial Sequence
  RPE65 RNA guide
gugagaagaaaguggguauaua

SEQ ID NO: 35067 - RNA, 22 nt, Artificial Sequence
  RPE65 RNA guide
gugaguuuucaccucugaacuc

SEQ ID NO: 35068 - RNA, 22 nt, Artificial Sequence
  RPE65 RNA guide
guggccuuuccaauuuuauaaa

SEQ ID NO: 35069 - RNA, 22 nt, Artificial Sequence
  RPE65 RNA guide
guggcuuuaaacccuguauuca

SEQ ID NO: 35070 - RNA, 22 nt, Artificial Sequence
  RPE65 RNA guide
guggguauauagguugccuccu

SEQ ID NO: 35071 - RNA, 22 nt, Artificial Sequence
  RPE65 RNA guide
gugucugcauggauacgaggga

SEQ ID NO: 35072 - RNA, 22 nt, Artificial Sequence
  RPE65 RNA guide
gugugucugcauggauacgagg

SEQ ID NO: 35073 - RNA, 22 nt, Artificial Sequence
  RPE65 RNA guide
guuacccuccuaggcaagucau

SEQ ID NO: 35074 - RNA, 22 nt, Artificial Sequence
  RPE65 RNA guide
guucagaggugaaaacucacau

SEQ ID NO: 35075 - RNA, 22 nt, Artificial Sequence
  RPE65 RNA guide
guucccucguauccaugcagac

SEQ ID NO: 35076 - RNA, 22 nt, Artificial Sequence
  RPE65 RNA guide
guugaauacaggguuuaaagcc

SEQ ID NO: 35077 - RNA, 22 nt, Artificial Sequence
  RPE65 RNA guide
guugaccuccaauucuugguuu

SEQ ID NO: 35078 - RNA, 22 nt, Artificial Sequence
  RPE65 RNA guide
guugccuccugaguucagaggu

SEQ ID NO: 35079 - RNA, 22 nt, Artificial Sequence
  RPE65 RNA guide
guuggaccccaaagcccuaggc

SEQ ID NO: 35080 - RNA, 22 nt, Artificial Sequence
  RPE65 RNA guide
guuuaaagccacucauguugga

SEQ ID NO: 35081 - RNA, 22 nt, Artificial Sequence
  RPE65 RNA guide
guuuucaccucugaacucagga

SEQ ID NO: 35082 - RNA, 22 nt, Artificial Sequence
  RPE65 RNA guide
uaaaaagaaaaaggaaucaaga

SEQ ID NO: 35083 - RNA, 22 nt, Artificial Sequence
  RPE65 RNA guide
uaaaaccaagaauuggagguca

SEQ ID NO: 35084 - RNA, 22 nt, Artificial Sequence
  RPE65 RNA guide
uaaaauuggaaaggccacuggg

SEQ ID NO: 35085 - RNA, 22 nt, Artificial Sequence
  RPE65 RNA guide
uaaaccauuggccaucuugauu

SEQ ID NO: 35086 - RNA, 22 nt, Artificial Sequence
  RPE65 RNA guide
uaaacccuguauucaacagaca

SEQ ID NO: 35087 - RNA, 22 nt, Artificial Sequence
  RPE65 RNA guide
uaaagcagcacuccaugccacu

SEQ ID NO: 35088 - RNA, 22 nt, Artificial Sequence
  RPE65 RNA guide
uaaagccacucauguuggaccc

SEQ ID NO: 35089 - RNA, 22 nt, Artificial Sequence
  RPE65 RNA guide
uaaagccuagggcuuugggguc

SEQ ID NO: 35090 - RNA, 22 nt, Artificial Sequence
  RPE65 RNA guide
uaaaggagaagcuaaagccuag

SEQ ID NO: 35091 - RNA, 22 nt, Artificial Sequence
  RPE65 RNA guide
uaaccuuggcaagauguugacc

SEQ ID NO: 35092 - RNA, 22 nt, Artificial Sequence
  RPE65 RNA guide
uaagguagauucuauuauuucu

SEQ ID NO: 35093 - RNA, 22 nt, Artificial Sequence
  RPE65 RNA guide
uaauguucccucguauccaugc

SEQ ID NO: 35094 - RNA, 22 nt, Artificial Sequence
  RPE65 RNA guide
uacaagcauuaaaugagagcgc

SEQ ID NO: 35095 - RNA, 22 nt, Artificial Sequence
  RPE65 RNA guide
uacaggguuuaaagccacucau

SEQ ID NO: 35096 - RNA, 22 nt, Artificial Sequence
  RPE65 RNA guide
uacauugugagaagaaaguggg

SEQ ID NO: 35097 - RNA, 22 nt, Artificial Sequence
  RPE65 RNA guide
uacccacuuucuucucacaaug

SEQ ID NO: 35098 - RNA, 22 nt, Artificial Sequence
  RPE65 RNA guide
uacccuccuaggcaagucaugu

SEQ ID NO: 35099 - RNA, 22 nt, Artificial Sequence
  RPE65 RNA guide
uaccugggccagugugucugca

SEQ ID NO: 35100 - RNA, 22 nt, Artificial Sequence
  RPE65 RNA guide
uacgagggaacauuaucaugga

SEQ ID NO: 35101 - RNA, 22 nt, Artificial Sequence
  RPE65 RNA guide
uacuuugaggaggaggaguggc

SEQ ID NO: 35102 - RNA, 22 nt, Artificial Sequence
  RPE65 RNA guide
uagacacugcgcucucauuuaa

SEQ ID NO: 35103 - RNA, 22 nt, Artificial Sequence
  RPE65 RNA guide
uagcuauuauuaugaagugcuu

SEQ ID NO: 35104 - RNA, 22 nt, Artificial Sequence
  RPE65 RNA guide
uagcuucuccuuuauuccauga

SEQ ID NO: 35105 - RNA, 22 nt, Artificial Sequence
  RPE65 RNA guide
uagcuuggcuccuccucccaug

SEQ ID NO: 35106 - RNA, 22 nt, Artificial Sequence
  RPE65 RNA guide
uaggaggguaaccuuggcaaga

SEQ ID NO: 35107 - RNA, 22 nt, Artificial Sequence
  RPE65 RNA guide
uaggcaagucaugucuguugaa

SEQ ID NO: 35108 - RNA, 22 nt, Artificial Sequence
  RPE65 RNA guide
uaggcccuacuuugaggaggag

SEQ ID NO: 35109 - RNA, 22 nt, Artificial Sequence
  RPE65 RNA guide
uaggcuuuagcuucuccuuuau

SEQ ID NO: 35110 - RNA, 22 nt, Artificial Sequence
  RPE65 RNA guide
uagggccuagcuuggcuccucc

SEQ ID NO: 35111 - RNA, 22 nt, Artificial Sequence
  RPE65 RNA guide
uagggcuuugggguccaacaug

SEQ ID NO: 35112 - RNA, 22 nt, Artificial Sequence
  RPE65 RNA guide
uagguugccuccugaguucaga

SEQ ID NO: 35113 - RNA, 22 nt, Artificial Sequence
  RPE65 RNA guide
uauaaaaccaagaauuggaggu

SEQ ID NO: 35114 - RNA, 22 nt, Artificial Sequence
  RPE65 RNA guide
uauaaaauuggaaaggccacug

SEQ ID NO: 35115 - RNA, 22 nt, Artificial Sequence
  RPE65 RNA guide
uauacccacuuucuucucacaa

SEQ ID NO: 35116 - RNA, 22 nt, Artificial Sequence
  RPE65 RNA guide
uauagguugccuccugaguuca

SEQ ID NO: 35117 - RNA, 22 nt, Artificial Sequence
  RPE65 RNA guide
uauauacccacuuucuucucac

SEQ ID NO: 35118 - RNA, 22 nt, Artificial Sequence
  RPE65 RNA guide
uauauagguugccuccugaguu

SEQ ID NO: 35119 - RNA, 22 nt, Artificial Sequence
  RPE65 RNA guide
uaucauggaauaaaggagaagc

SEQ ID NO: 35120 - RNA, 22 nt, Artificial Sequence
  RPE65 RNA guide
uauccaugcagacacacuggcc

SEQ ID NO: 35121 - RNA, 22 nt, Artificial Sequence
  RPE65 RNA guide
uauuaaaccauuggccaucuug

SEQ ID NO: 35122 - RNA, 22 nt, Artificial Sequence
  RPE65 RNA guide
uauuauuaaaccauuggccauc

SEQ ID NO: 35123 - RNA, 22 nt, Artificial Sequence
  RPE65 RNA guide
uauuauuaugaagugcuuugug

SEQ ID NO: 35124 - RNA, 22 nt, Artificial Sequence
  RPE65 RNA guide
uauucaacagacaugacuugcc

SEQ ID NO: 35125 - RNA, 22 nt, Artificial Sequence
  RPE65 RNA guide
uauuccaugauaauguucccuc

SEQ ID NO: 35126 - RNA, 22 nt, Artificial Sequence
  RPE65 RNA guide
ucaaaguagggccuagcuuggc

SEQ ID NO: 35127 - RNA, 22 nt, Artificial Sequence
  RPE65 RNA guide
ucaacagacaugacuugccuag

SEQ ID NO: 35128 - RNA, 22 nt, Artificial Sequence
  RPE65 RNA guide
ucaacaucuugccaagguuacc

SEQ ID NO: 35129 - RNA, 22 nt, Artificial Sequence
  RPE65 RNA guide
ucaagauggccaaugguuuaau

SEQ ID NO: 35130 - RNA, 22 nt, Artificial Sequence
  RPE65 RNA guide
ucacaauagcuauuauuaugaa

SEQ ID NO: 35131 - RNA, 22 nt, Artificial Sequence
  RPE65 RNA guide
ucacaauguaccugggccagug

SEQ ID NO: 35132 - RNA, 22 nt, Artificial Sequence
  RPE65 RNA guide
ucacaugggaggaggagccaag

SEQ ID NO: 35133 - RNA, 22 nt, Artificial Sequence
  RPE65 RNA guide
ucaccucugaacucaggaggca

SEQ ID NO: 35134 - RNA, 22 nt, Artificial Sequence
  RPE65 RNA guide
ucagaggugaaaacucacaugg

SEQ ID NO: 35135 - RNA, 22 nt, Artificial Sequence
  RPE65 RNA guide
ucaggaggcaaccuauauaccc

SEQ ID NO: 35136 - RNA, 22 nt, Artificial Sequence
  RPE65 RNA guide
ucauggaauaaaggagaagcua

SEQ ID NO: 35137 - RNA, 22 nt, Artificial Sequence
  RPE65 RNA guide
ucaugucuguugaauacagggu

SEQ ID NO: 35138 - RNA, 22 nt, Artificial Sequence
  RPE65 RNA guide
ucauguuggaccccaaagcccu

SEQ ID NO: 35139 - RNA, 22 nt, Artificial Sequence
  RPE65 RNA guide
ucauuacaagcauuaaaugaga

SEQ ID NO: 35140 - RNA, 22 nt, Artificial Sequence
  RPE65 RNA guide
uccaacaugaguggcuuuaaac

SEQ ID NO: 35141 - RNA, 22 nt, Artificial Sequence
  RPE65 RNA guide
uccaugauaauguucccucgua

SEQ ID NO: 35142 - RNA, 22 nt, Artificial Sequence
  RPE65 RNA guide
uccaugcagacacacuggccca

SEQ ID NO: 35143 - RNA, 22 nt, Artificial Sequence
  RPE65 RNA guide
uccaugccacuccuccuccuca

SEQ ID NO: 35144 - RNA, 22 nt, Artificial Sequence
  RPE65 RNA guide
ucccaguggccuuuccaauuuu

SEQ ID NO: 35145 - RNA, 22 nt, Artificial Sequence
  RPE65 RNA guide
ucccaugugaguuuucaccucu

SEQ ID NO: 35146 - RNA, 22 nt, Artificial Sequence
  RPE65 RNA guide
ucccucguauccaugcagacac

SEQ ID NO: 35147 - RNA, 22 nt, Artificial Sequence
  RPE65 RNA guide
uccuaggcaagucaugucuguu

SEQ ID NO: 35148 - RNA, 22 nt, Artificial Sequence
  RPE65 RNA guide
uccucaaaguagggccuagcuu

SEQ ID NO: 35149 - RNA, 22 nt, Artificial Sequence
  RPE65 RNA guide
uccucccaugugaguuuucacc

SEQ ID NO: 35150 - RNA, 22 nt, Artificial Sequence
  RPE65 RNA guide
uccuccucaaaguagggccuag

SEQ ID NO: 35151 - RNA, 22 nt, Artificial Sequence
  RPE65 RNA guide
uccuccucccaugugaguuuuc

SEQ ID NO: 35152 - RNA, 22 nt, Artificial Sequence
  RPE65 RNA guide
uccuccuccucaaaguagggcc

SEQ ID NO: 35153 - RNA, 22 nt, Artificial Sequence
  RPE65 RNA guide
uccugaguucagaggugaaaac

SEQ ID NO: 35154 - RNA, 22 nt, Artificial Sequence
  RPE65 RNA guide
uccuuuauuccaugauaauguu

SEQ ID NO: 35155 - RNA, 22 nt, Artificial Sequence
  RPE65 RNA guide
ucguauccaugcagacacacug

SEQ ID NO: 35156 - RNA, 22 nt, Artificial Sequence
  RPE65 RNA guide
ucucacaauguaccugggccag

SEQ ID NO: 35157 - RNA, 22 nt, Artificial Sequence
  RPE65 RNA guide
ucuccuuuauuccaugauaaug

SEQ ID NO: 35158 - RNA, 22 nt, Artificial Sequence
  RPE65 RNA guide
ucugaacucaggaggcaaccua

SEQ ID NO: 35159 - RNA, 22 nt, Artificial Sequence
  RPE65 RNA guide
ucugcauggauacgagggaaca

SEQ ID NO: 35160 - RNA, 22 nt, Artificial Sequence
  RPE65 RNA guide
ucuguugaauacaggguuuaaa

SEQ ID NO: 35161 - RNA, 22 nt, Artificial Sequence
  RPE65 RNA guide
ucuucucacaauguaccugggc

SEQ ID NO: 35162 - RNA, 22 nt, Artificial Sequence
  RPE65 RNA guide
ucuugccaagguuacccuccua

SEQ ID NO: 35163 - RNA, 22 nt, Artificial Sequence
  RPE65 RNA guide
ucuuuuuauaaaauuggaaagg

SEQ ID NO: 35164 - RNA, 22 nt, Artificial Sequence
  RPE65 RNA guide
ugaaaacucacaugggaggagg

SEQ ID NO: 35165 - RNA, 22 nt, Artificial Sequence
  RPE65 RNA guide
ugaacucaggaggcaaccuaua

SEQ ID NO: 35166 - RNA, 22 nt, Artificial Sequence
  RPE65 RNA guide
ugaauacaggguuuaaagccac

SEQ ID NO: 35167 - RNA, 22 nt, Artificial Sequence
  RPE65 RNA guide
ugaccuccaauucuugguuuua

SEQ ID NO: 35168 - RNA, 22 nt, Artificial Sequence
  RPE65 RNA guide
ugacuugccuaggaggguaacc

SEQ ID NO: 35169 - RNA, 22 nt, Artificial Sequence
  RPE65 RNA guide
ugagaagaaaguggguauauag

SEQ ID NO: 35170 - RNA, 22 nt, Artificial Sequence
  RPE65 RNA guide
ugaggaggaggaguggcaugga

SEQ ID NO: 35171 - RNA, 22 nt, Artificial Sequence
  RPE65 RNA guide
ugaguggcuuuaaacccuguau

SEQ ID NO: 35172 - RNA, 22 nt, Artificial Sequence
  RPE65 RNA guide
ugaguucagaggugaaaacuca

SEQ ID NO: 35173 - RNA, 22 nt, Artificial Sequence
  RPE65 RNA guide
ugaguuuucaccucugaacuca

SEQ ID NO: 35174 - RNA, 22 nt, Artificial Sequence
  RPE65 RNA guide
ugauaauguucccucguaucca

SEQ ID NO: 35175 - RNA, 22 nt, Artificial Sequence
  RPE65 RNA guide
ugcagacacacuggcccaggua

SEQ ID NO: 35176 - RNA, 22 nt, Artificial Sequence
  RPE65 RNA guide
ugcauggauacgagggaacauu

SEQ ID NO: 35177 - RNA, 22 nt, Artificial Sequence
  RPE65 RNA guide
ugccaagguuacccuccuaggc

SEQ ID NO: 35178 - RNA, 22 nt, Artificial Sequence
  RPE65 RNA guide
ugccacuccuccuccucaaagu

SEQ ID NO: 35179 - RNA, 22 nt, Artificial Sequence
  RPE65 RNA guide
ugccuaggaggguaaccuuggc

SEQ ID NO: 35180 - RNA, 22 nt, Artificial Sequence
  RPE65 RNA guide
ugccuccugaguucagagguga

SEQ ID NO: 35181 - RNA, 22 nt, Artificial Sequence
  RPE65 RNA guide
ugcgcucucauuuaaugcuugu

SEQ ID NO: 35182 - RNA, 22 nt, Artificial Sequence
  RPE65 RNA guide
ugcuagacacugcgcucucauu

SEQ ID NO: 35183 - RNA, 22 nt, Artificial Sequence
  RPE65 RNA guide
uggaaaggccacugggaaaggg

SEQ ID NO: 35184 - RNA, 22 nt, Artificial Sequence
  RPE65 RNA guide
uggaauaaaggagaagcuaaag

SEQ ID NO: 35185 - RNA, 22 nt, Artificial Sequence
  RPE65 RNA guide
uggaccccaaagcccuaggcuu

SEQ ID NO: 35186 - RNA, 22 nt, Artificial Sequence
  RPE65 RNA guide
uggaggucaacaucuugccaag

SEQ ID NO: 35187 - RNA, 22 nt, Artificial Sequence
  RPE65 RNA guide
uggauacgagggaacauuauca

SEQ ID NO: 35188 - RNA, 22 nt, Artificial Sequence
  RPE65 RNA guide
uggcaagauguugaccuccaau

SEQ ID NO: 35189 - RNA, 22 nt, Artificial Sequence
  RPE65 RNA guide
uggccaucuugauuccuuuuuc

SEQ ID NO: 35190 - RNA, 22 nt, Artificial Sequence
  RPE65 RNA guide
uggcccagguacauugugagaa

SEQ ID NO: 35191 - RNA, 22 nt, Artificial Sequence
  RPE65 RNA guide
uggcuccuccucccaugugagu

SEQ ID NO: 35192 - RNA, 22 nt, Artificial Sequence
  RPE65 RNA guide
uggcuuuaaacccuguauucaa

SEQ ID NO: 35193 - RNA, 22 nt, Artificial Sequence
  RPE65 RNA guide
ugggagaaauaauagaaucuac

SEQ ID NO: 35194 - RNA, 22 nt, Artificial Sequence
  RPE65 RNA guide
ugggaggaggagccaagcuagg

SEQ ID NO: 35195 - RNA, 22 nt, Artificial Sequence
  RPE65 RNA guide
ugggccagugugucugcaugga

SEQ ID NO: 35196 - RNA, 22 nt, Artificial Sequence
  RPE65 RNA guide
ugggguccaacaugaguggcuu

SEQ ID NO: 35197 - RNA, 22 nt, Artificial Sequence
  RPE65 RNA guide
uggguauauagguugccuccug

SEQ ID NO: 35198 - RNA, 22 nt, Artificial Sequence
  RPE65 RNA guide
uguaccugggccagugugucug

SEQ ID NO: 35199 - RNA, 22 nt, Artificial Sequence
  RPE65 RNA guide
uguauucaacagacaugacuug

SEQ ID NO: 35200 - RNA, 22 nt, Artificial Sequence
  RPE65 RNA guide
ugucugcauggauacgagggaa

SEQ ID NO: 35201 - RNA, 22 nt, Artificial Sequence
  RPE65 RNA guide
ugucuguugaauacaggguuua

SEQ ID NO: 35202 - RNA, 22 nt, Artificial Sequence
  RPE65 RNA guide
ugugagaagaaaguggguauau

SEQ ID NO: 35203 - RNA, 22 nt, Artificial Sequence
  RPE65 RNA guide
ugugaguuuucaccucugaacu

SEQ ID NO: 35204 - RNA, 22 nt, Artificial Sequence
  RPE65 RNA guide
ugugucugcauggauacgaggg

SEQ ID NO: 35205 - RNA, 22 nt, Artificial Sequence
  RPE65 RNA guide
uguucccucguauccaugcaga

SEQ ID NO: 35206 - RNA, 22 nt, Artificial Sequence
  RPE65 RNA guide
uguugaauacaggguuuaaagc

SEQ ID NO: 35207 - RNA, 22 nt, Artificial Sequence
  RPE65 RNA guide
uguugaccuccaauucuugguu

SEQ ID NO: 35208 - RNA, 22 nt, Artificial Sequence
  RPE65 RNA guide
uguuggaccccaaagcccuagg

SEQ ID NO: 35209 - RNA, 22 nt, Artificial Sequence
  RPE65 RNA guide
uuaaaccauuggccaucuugau

SEQ ID NO: 35210 - RNA, 22 nt, Artificial Sequence
  RPE65 RNA guide
uuaaacccuguauucaacagac

SEQ ID NO: 35211 - RNA, 22 nt, Artificial Sequence
  RPE65 RNA guide
uuaaagccacucauguuggacc

SEQ ID NO: 35212 - RNA, 22 nt, Artificial Sequence
  RPE65 RNA guide
uuacaagcauuaaaugagagcg

SEQ ID NO: 35213 - RNA, 22 nt, Artificial Sequence
  RPE65 RNA guide
uuacccuccuaggcaagucaug

SEQ ID NO: 35214 - RNA, 22 nt, Artificial Sequence
  RPE65 RNA guide
uuagcuucuccuuuauuccaug

SEQ ID NO: 35215 - RNA, 22 nt, Artificial Sequence
  RPE65 RNA guide
uuauaaaaccaagaauuggagg

SEQ ID NO: 35216 - RNA, 22 nt, Artificial Sequence
  RPE65 RNA guide
uuauaaaauuggaaaggccacu

SEQ ID NO: 35217 - RNA, 22 nt, Artificial Sequence
  RPE65 RNA guide
uuaucauggaauaaaggagaag

SEQ ID NO: 35218 - RNA, 22 nt, Artificial Sequence
  RPE65 RNA guide
uuauuaaaccauuggccaucuu

SEQ ID NO: 35219 - RNA, 22 nt, Artificial Sequence
  RPE65 RNA guide
uuauuauuaaaccauuggccau

SEQ ID NO: 35220 - RNA, 22 nt, Artificial Sequence
  RPE65 RNA guide
uuauuccaugauaauguucccu

SEQ ID NO: 35221 - RNA, 22 nt, Artificial Sequence
  RPE65 RNA guide
uucaacagacaugacuugccua

SEQ ID NO: 35222 - RNA, 22 nt, Artificial Sequence
  RPE65 RNA guide
uucaccucugaacucaggaggc

SEQ ID NO: 35223 - RNA, 22 nt, Artificial Sequence
  RPE65 RNA guide
uucagaggugaaaacucacaug

SEQ ID NO: 35224 - RNA, 22 nt, Artificial Sequence
  RPE65 RNA guide
uucauuacaagcauuaaaugag

SEQ ID NO: 35225 - RNA, 22 nt, Artificial Sequence
  RPE65 RNA guide
uuccaugauaauguucccucgu

SEQ ID NO: 35226 - RNA, 22 nt, Artificial Sequence
  RPE65 RNA guide
uucccaguggccuuuccaauuu

SEQ ID NO: 35227 - RNA, 22 nt, Artificial Sequence
  RPE65 RNA guide
uucccucguauccaugcagaca

SEQ ID NO: 35228 - RNA, 22 nt, Artificial Sequence
  RPE65 RNA guide
uucucacaauguaccugggcca

SEQ ID NO: 35229 - RNA, 22 nt, Artificial Sequence
  RPE65 RNA guide
uucuccuuuauuccaugauaau

SEQ ID NO: 35230 - RNA, 22 nt, Artificial Sequence
  RPE65 RNA guide
uucuucucacaauguaccuggg

SEQ ID NO: 35231 - RNA, 22 nt, Artificial Sequence
  RPE65 RNA guide
uugaauacaggguuuaaagcca

SEQ ID NO: 35232 - RNA, 22 nt, Artificial Sequence
  RPE65 RNA guide
uugaccuccaauucuugguuuu

SEQ ID NO: 35233 - RNA, 22 nt, Artificial Sequence
  RPE65 RNA guide
uugaggaggaggaguggcaugg

SEQ ID NO: 35234 - RNA, 22 nt, Artificial Sequence
  RPE65 RNA guide
uugccaagguuacccuccuagg

SEQ ID NO: 35235 - RNA, 22 nt, Artificial Sequence
  RPE65 RNA guide
uugccuaggaggguaaccuugg

SEQ ID NO: 35236 - RNA, 22 nt, Artificial Sequence
  RPE65 RNA guide
uugccuccugaguucagaggug

SEQ ID NO: 35237 - RNA, 22 nt, Artificial Sequence
  RPE65 RNA guide
uuggaaaggccacugggaaagg

SEQ ID NO: 35238 - RNA, 22 nt, Artificial Sequence
  RPE65 RNA guide
uuggaccccaaagcccuaggcu

SEQ ID NO: 35239 - RNA, 22 nt, Artificial Sequence
  RPE65 RNA guide
uuggaggucaacaucuugccaa

SEQ ID NO: 35240 - RNA, 22 nt, Artificial Sequence
  RPE65 RNA guide
uuggcaagauguugaccuccaa

SEQ ID NO: 35241 - RNA, 22 nt, Artificial Sequence
  RPE65 RNA guide
uuggccaucuugauuccuuuuu

SEQ ID NO: 35242 - RNA, 22 nt, Artificial Sequence
  RPE65 RNA guide
uuggcuccuccucccaugugag

SEQ ID NO: 35243 - RNA, 22 nt, Artificial Sequence
  RPE65 RNA guide
uugggguccaacaugaguggcu

SEQ ID NO: 35244 - RNA, 22 nt, Artificial Sequence
  RPE65 RNA guide
uugugagaagaaaguggguaua

SEQ ID NO: 35245 - RNA, 22 nt, Artificial Sequence
  RPE65 RNA guide
uuuaaacccuguauucaacaga

SEQ ID NO: 35246 - RNA, 22 nt, Artificial Sequence
  RPE65 RNA guide
uuuaaagccacucauguuggac

SEQ ID NO: 35247 - RNA, 22 nt, Artificial Sequence
  RPE65 RNA guide
uuuagcuucuccuuuauuccau

SEQ ID NO: 35248 - RNA, 22 nt, Artificial Sequence
  RPE65 RNA guide
uuuauaaaauuggaaaggccac

SEQ ID NO: 35249 - RNA, 22 nt, Artificial Sequence
  RPE65 RNA guide
uuuauuccaugauaauguuccc

SEQ ID NO: 35250 - RNA, 22 nt, Artificial Sequence
  RPE65 RNA guide
uuucaccucugaacucaggagg

SEQ ID NO: 35251 - RNA, 22 nt, Artificial Sequence
  RPE65 RNA guide
uuucccaguggccuuuccaauu

SEQ ID NO: 35252 - RNA, 22 nt, Artificial Sequence
  RPE65 RNA guide
uuucuucucacaauguaccugg

SEQ ID NO: 35253 - RNA, 22 nt, Artificial Sequence
  RPE65 RNA guide
uuugaggaggaggaguggcaug

SEQ ID NO: 35254 - RNA, 22 nt, Artificial Sequence
  RPE65 RNA guide
uuugggguccaacaugaguggc

SEQ ID NO: 35255 - RNA, 22 nt, Artificial Sequence
  RPE65 RNA guide
uuuuauaaaauuggaaaggcca

SEQ ID NO: 35256 - RNA, 22 nt, Artificial Sequence
  RPE65 RNA guide
uuuucaccucugaacucaggag

SEQ ID NO: 35257 - RNA, 22 nt, Artificial Sequence
  RPE65 RNA guide
uuuuuauaaaauuggaaaggcc

SEQ ID NO: 35258 - RNA, 20 nt, Artificial Sequence
  RPE65 RNA guide
aaaaacguaaacucaaggga

SEQ ID NO: 35259 - RNA, 20 nt, Artificial Sequence
  RPE65 RNA guide
aaaacauaaaaguaacagag

SEQ ID NO: 35260 - RNA, 20 nt, Artificial Sequence
  RPE65 RNA guide
aaaacguaaacucaagggac

SEQ ID NO: 35261 - RNA, 20 nt, Artificial Sequence
  RPE65 RNA guide
aaaaguaacagagggagauu

SEQ ID NO: 35262 - RNA, 20 nt, Artificial Sequence
  RPE65 RNA guide
aaaauuccggacauggugug

SEQ ID NO: 35263 - RNA, 20 nt, Artificial Sequence
  RPE65 RNA guide
aaacauaaaaguaacagagg

SEQ ID NO: 35264 - RNA, 20 nt, Artificial Sequence
  RPE65 RNA guide
aaacauagggaagaguauag

SEQ ID NO: 35265 - RNA, 20 nt, Artificial Sequence
  RPE65 RNA guide
aaacccuuuauucuucaugu

SEQ ID NO: 35266 - RNA, 20 nt, Artificial Sequence
  RPE65 RNA guide
aaaccucacagaugaggaaa

SEQ ID NO: 35267 - RNA, 20 nt, Artificial Sequence
  RPE65 RNA guide
aaacguaaacucaagggaca

SEQ ID NO: 35268 - RNA, 20 nt, Artificial Sequence
  RPE65 RNA guide
aaacucaagggacauugugu

SEQ ID NO: 35269 - RNA, 20 nt, Artificial Sequence
  RPE65 RNA guide
aaacuuacugggaaaauucc

SEQ ID NO: 35270 - RNA, 20 nt, Artificial Sequence
  RPE65 RNA guide
aaaggguuuuauuagcucac

SEQ ID NO: 35271 - RNA, 20 nt, Artificial Sequence
  RPE65 RNA guide
aaaguaacagagggagauug

SEQ ID NO: 35272 - RNA, 20 nt, Artificial Sequence
  RPE65 RNA guide
aaaguucauguuguccugcu

SEQ ID NO: 35273 - RNA, 20 nt, Artificial Sequence
  RPE65 RNA guide
aaauuccggacauggugugc

SEQ ID NO: 35274 - RNA, 20 nt, Artificial Sequence
  RPE65 RNA guide
aaauugagguucagaggagu

SEQ ID NO: 35275 - RNA, 20 nt, Artificial Sequence
  RPE65 RNA guide
aacauaaaaguaacagaggg

SEQ ID NO: 35276 - RNA, 20 nt, Artificial Sequence
  RPE65 RNA guide
aacauagggaagaguauaga

SEQ ID NO: 35277 - RNA, 20 nt, Artificial Sequence
  RPE65 RNA guide
aacaugaacuuucuauauca

SEQ ID NO: 35278 - RNA, 20 nt, Artificial Sequence
  RPE65 RNA guide
aacccagcuuggccacauau

SEQ ID NO: 35279 - RNA, 20 nt, Artificial Sequence
  RPE65 RNA guide
aacccuuuauucuucauguu

SEQ ID NO: 35280 - RNA, 20 nt, Artificial Sequence
  RPE65 RNA guide
aaccuaaacuuacugggaaa

SEQ ID NO: 35281 - RNA, 20 nt, Artificial Sequence
  RPE65 RNA guide
aaccuaucaaccuaaacuua

SEQ ID NO: 35282 - RNA, 20 nt, Artificial Sequence
  RPE65 RNA guide
aaccucaauuuccucaucug

SEQ ID NO: 35283 - RNA, 20 nt, Artificial Sequence
  RPE65 RNA guide
aaccucacagaugaggaaau

SEQ ID NO: 35284 - RNA, 20 nt, Artificial Sequence
  RPE65 RNA guide
aacguaaacucaagggacau

SEQ ID NO: 35285 - RNA, 20 nt, Artificial Sequence
  RPE65 RNA guide
aacuaggauucuaacccagc

SEQ ID NO: 35286 - RNA, 20 nt, Artificial Sequence
  RPE65 RNA guide
aacucaagggacauuguguc

SEQ ID NO: 35287 - RNA, 20 nt, Artificial Sequence
  RPE65 RNA guide
aacuccucugaaccucaauu

SEQ ID NO: 35288 - RNA, 20 nt, Artificial Sequence
  RPE65 RNA guide
aacuuacugggaaaauuccg

SEQ ID NO: 35289 - RNA, 20 nt, Artificial Sequence
  RPE65 RNA guide
aacuucccccagggcugcau

SEQ ID NO: 35290 - RNA, 20 nt, Artificial Sequence
  RPE65 RNA guide
aacuuucuauaucacaccau

SEQ ID NO: 35291 - RNA, 20 nt, Artificial Sequence
  RPE65 RNA guide
aagaaagugagcuaauaaaa

SEQ ID NO: 35292 - RNA, 20 nt, Artificial Sequence
  RPE65 RNA guide
aagaguauagacaggagcaa

SEQ ID NO: 35293 - RNA, 20 nt, Artificial Sequence
  RPE65 RNA guide
aagauaaaaacguaaacuca

SEQ ID NO: 35294 - RNA, 20 nt, Artificial Sequence
  RPE65 RNA guide
aagcagggcagacacaaugu

SEQ ID NO: 35295 - RNA, 20 nt, Artificial Sequence
  RPE65 RNA guide
aagcuccacaugggcuguac

SEQ ID NO: 35296 - RNA, 20 nt, Artificial Sequence
  RPE65 RNA guide
aagcuggguuagaauccuag

SEQ ID NO: 35297 - RNA, 20 nt, Artificial Sequence
  RPE65 RNA guide
aaggacauugaaacauaggg

SEQ ID NO: 35298 - RNA, 20 nt, Artificial Sequence
  RPE65 RNA guide
aagggacauugugucugccc

SEQ ID NO: 35299 - RNA, 20 nt, Artificial Sequence
  RPE65 RNA guide
aaggguuuuauuagcucacu

SEQ ID NO: 35300 - RNA, 20 nt, Artificial Sequence
  RPE65 RNA guide
aagucacaaucauaaaugca

SEQ ID NO: 35301 - RNA, 20 nt, Artificial Sequence
  RPE65 RNA guide
aagugauuggcauauguggc

SEQ ID NO: 35302 - RNA, 20 nt, Artificial Sequence
  RPE65 RNA guide
aaguucacauaggaccccca

SEQ ID NO: 35303 - RNA, 20 nt, Artificial Sequence
  RPE65 RNA guide
aaguucauguuguccugcuc

SEQ ID NO: 35304 - RNA, 20 nt, Artificial Sequence
  RPE65 RNA guide
aaguuuagguugauagguua

SEQ ID NO: 35305 - RNA, 20 nt, Artificial Sequence
  RPE65 RNA guide
aauauaauucagcacaccau

SEQ ID NO: 35306 - RNA, 20 nt, Artificial Sequence
  RPE65 RNA guide
aaucacuuaacuccucugaa

SEQ ID NO: 35307 - RNA, 20 nt, Artificial Sequence
  RPE65 RNA guide
aauccguacagcccaugugg

SEQ ID NO: 35308 - RNA, 20 nt, Artificial Sequence
  RPE65 RNA guide
aauccuaguuggccagagca

SEQ ID NO: 35309 - RNA, 20 nt, Artificial Sequence
  RPE65 RNA guide
aaucucccucuguuacuuuu

SEQ ID NO: 35310 - RNA, 20 nt, Artificial Sequence
  RPE65 RNA guide
aaugcacaacaugaagaaua

SEQ ID NO: 35311 - RNA, 20 nt, Artificial Sequence
  RPE65 RNA guide
aauggccauucuaagcucca

SEQ ID NO: 35312 - RNA, 20 nt, Artificial Sequence
  RPE65 RNA guide
aauggccauucuaugugucc

SEQ ID NO: 35313 - RNA, 20 nt, Artificial Sequence
  RPE65 RNA guide
aaugucccuugaguuuacgu

SEQ ID NO: 35314 - RNA, 20 nt, Artificial Sequence
  RPE65 RNA guide
aauucagcacaccauguccg

SEQ ID NO: 35315 - RNA, 20 nt, Artificial Sequence
  RPE65 RNA guide
aauuccggacauggugugcu

SEQ ID NO: 35316 - RNA, 20 nt, Artificial Sequence
  RPE65 RNA guide
aauuuccucaucugugaggu

SEQ ID NO: 35317 - RNA, 20 nt, Artificial Sequence
  RPE65 RNA guide
aauuuucccaguaaguuuag

SEQ ID NO: 35318 - RNA, 20 nt, Artificial Sequence
  RPE65 RNA guide
acaaugucccuugaguuuac

SEQ ID NO: 35319 - RNA, 20 nt, Artificial Sequence
  RPE65 RNA guide
acacaaugucccuugaguuu

SEQ ID NO: 35320 - RNA, 20 nt, Artificial Sequence
  RPE65 RNA guide
acacauagaauggccauucu

SEQ ID NO: 35321 - RNA, 20 nt, Artificial Sequence
  RPE65 RNA guide
acaccaugcagcccuggggg

SEQ ID NO: 35322 - RNA, 20 nt, Artificial Sequence
  RPE65 RNA guide
acaccauguccggaauuuuc

SEQ ID NO: 35323 - RNA, 20 nt, Artificial Sequence
  RPE65 RNA guide
acagcccauguggagcuuag

SEQ ID NO: 35324 - RNA, 20 nt, Artificial Sequence
  RPE65 RNA guide
acaggagcaauccguacagc

SEQ ID NO: 35325 - RNA, 20 nt, Artificial Sequence
  RPE65 RNA guide
acauaaaaguaacagaggga

SEQ ID NO: 35326 - RNA, 20 nt, Artificial Sequence
  RPE65 RNA guide
acauagaauggccauucuaa

SEQ ID NO: 35327 - RNA, 20 nt, Artificial Sequence
  RPE65 RNA guide
acauaggacccccaccccca

SEQ ID NO: 35328 - RNA, 20 nt, Artificial Sequence
  RPE65 RNA guide
acauagggaagaguauagac

SEQ ID NO: 35329 - RNA, 20 nt, Artificial Sequence
  RPE65 RNA guide
acauaugccaaucacuuaac

SEQ ID NO: 35330 - RNA, 20 nt, Artificial Sequence
  RPE65 RNA guide
acaugaacuuucuauaucac

SEQ ID NO: 35331 - RNA, 20 nt, Artificial Sequence
  RPE65 RNA guide
acaugggcuguacggauugc

SEQ ID NO: 35332 - RNA, 20 nt, Artificial Sequence
  RPE65 RNA guide
acauugaaacauagggaaga

SEQ ID NO: 35333 - RNA, 20 nt, Artificial Sequence
  RPE65 RNA guide
acauugugucugcccugcuu

SEQ ID NO: 35334 - RNA, 20 nt, Artificial Sequence
  RPE65 RNA guide
accaagcagggcagacacaa

SEQ ID NO: 35335 - RNA, 20 nt, Artificial Sequence
  RPE65 RNA guide
accaugcagcccugggggaa

SEQ ID NO: 35336 - RNA, 20 nt, Artificial Sequence
  RPE65 RNA guide
accauguccggaauuuuccc

SEQ ID NO: 35337 - RNA, 20 nt, Artificial Sequence
  RPE65 RNA guide
acccagcuuggccacauaug

SEQ ID NO: 35338 - RNA, 20 nt, Artificial Sequence
  RPE65 RNA guide
accccaagaaagugagcuaa

SEQ ID NO: 35339 - RNA, 20 nt, Artificial Sequence
  RPE65 RNA guide
acccccacccccaucaccua

SEQ ID NO: 35340 - RNA, 20 nt, Artificial Sequence
  RPE65 RNA guide
acccccaucaccuauaaccu

SEQ ID NO: 35341 - RNA, 20 nt, Artificial Sequence
  RPE65 RNA guide
acccuuuauucuucauguug

SEQ ID NO: 35342 - RNA, 20 nt, Artificial Sequence
  RPE65 RNA guide
accuaaacuuacugggaaaa

SEQ ID NO: 35343 - RNA, 20 nt, Artificial Sequence
  RPE65 RNA guide
accuauaaccuaucaaccua

SEQ ID NO: 35344 - RNA, 20 nt, Artificial Sequence
  RPE65 RNA guide
accuaucaaccuaaacuuac

SEQ ID NO: 35345 - RNA, 20 nt, Artificial Sequence
  RPE65 RNA guide
accucaauuuccucaucugu

SEQ ID NO: 35346 - RNA, 20 nt, Artificial Sequence
  RPE65 RNA guide
accucacagaugaggaaauu

SEQ ID NO: 35347 - RNA, 20 nt, Artificial Sequence
  RPE65 RNA guide
acggauugcuccugucuaua

SEQ ID NO: 35348 - RNA, 20 nt, Artificial Sequence
  RPE65 RNA guide
acguaaacucaagggacauu

SEQ ID NO: 35349 - RNA, 20 nt, Artificial Sequence
  RPE65 RNA guide
acuaggauucuaacccagcu

SEQ ID NO: 35350 - RNA, 20 nt, Artificial Sequence
  RPE65 RNA guide
acucaagggacauugugucu

SEQ ID NO: 35351 - RNA, 20 nt, Artificial Sequence
  RPE65 RNA guide
acuccucugaaccucaauuu

SEQ ID NO: 35352 - RNA, 20 nt, Artificial Sequence
  RPE65 RNA guide
acucuucccuauguuucaau

SEQ ID NO: 35353 - RNA, 20 nt, Artificial Sequence
  RPE65 RNA guide
acugggaaaauuccggacau

SEQ ID NO: 35354 - RNA, 20 nt, Artificial Sequence
  RPE65 RNA guide
acuuacugggaaaauuccgg

SEQ ID NO: 35355 - RNA, 20 nt, Artificial Sequence
  RPE65 RNA guide
acuucccccagggcugcaug

SEQ ID NO: 35356 - RNA, 20 nt, Artificial Sequence
  RPE65 RNA guide
acuugaugaggacacauaga

SEQ ID NO: 35357 - RNA, 20 nt, Artificial Sequence
  RPE65 RNA guide
acuuucuauaucacaccaug

SEQ ID NO: 35358 - RNA, 20 nt, Artificial Sequence
  RPE65 RNA guide
acuuucuuggggugaccaag

SEQ ID NO: 35359 - RNA, 20 nt, Artificial Sequence
  RPE65 RNA guide
agaaagugagcuaauaaaac

SEQ ID NO: 35360 - RNA, 20 nt, Artificial Sequence
  RPE65 RNA guide
agaaaguucauguuguccug

SEQ ID NO: 35361 - RNA, 20 nt, Artificial Sequence
  RPE65 RNA guide
agaauccuaguuggccagag

SEQ ID NO: 35362 - RNA, 20 nt, Artificial Sequence
  RPE65 RNA guide
agaauggccauucuaagcuc

SEQ ID NO: 35363 - RNA, 20 nt, Artificial Sequence
  RPE65 RNA guide
agaauggccauucuaugugu

SEQ ID NO: 35364 - RNA, 20 nt, Artificial Sequence
  RPE65 RNA guide
agacacaaugucccuugagu

SEQ ID NO: 35365 - RNA, 20 nt, Artificial Sequence
  RPE65 RNA guide
agacaggagcaauccguaca

SEQ ID NO: 35366 - RNA, 20 nt, Artificial Sequence
  RPE65 RNA guide
agagcaggacaacaugaacu

SEQ ID NO: 35367 - RNA, 20 nt, Artificial Sequence
  RPE65 RNA guide
agaggaguuaagugauuggc

SEQ ID NO: 35368 - RNA, 20 nt, Artificial Sequence
  RPE65 RNA guide
agaguauagacaggagcaau

SEQ ID NO: 35369 - RNA, 20 nt, Artificial Sequence
  RPE65 RNA guide
agauaaaaacguaaacucaa

SEQ ID NO: 35370 - RNA, 20 nt, Artificial Sequence
  RPE65 RNA guide
agcaauccguacagcccaug

SEQ ID NO: 35371 - RNA, 20 nt, Artificial Sequence
  RPE65 RNA guide
agcacaccauguccggaauu

SEQ ID NO: 35372 - RNA, 20 nt, Artificial Sequence
  RPE65 RNA guide
agcaggacaacaugaacuuu

SEQ ID NO: 35373 - RNA, 20 nt, Artificial Sequence
  RPE65 RNA guide
agcagggcagacacaauguc

SEQ ID NO: 35374 - RNA, 20 nt, Artificial Sequence
  RPE65 RNA guide
agcccauguggagcuuagaa

SEQ ID NO: 35375 - RNA, 20 nt, Artificial Sequence
  RPE65 RNA guide
agcccugggggaaguucaca

SEQ ID NO: 35376 - RNA, 20 nt, Artificial Sequence
  RPE65 RNA guide
agcucacuuucuugggguga

SEQ ID NO: 35377 - RNA, 20 nt, Artificial Sequence
  RPE65 RNA guide
agcuccacaugggcuguacg

SEQ ID NO: 35378 - RNA, 20 nt, Artificial Sequence
  RPE65 RNA guide
agcuggguuagaauccuagu

SEQ ID NO: 35379 - RNA, 20 nt, Artificial Sequence
  RPE65 RNA guide
agcuuagaauggccauucua

SEQ ID NO: 35380 - RNA, 20 nt, Artificial Sequence
  RPE65 RNA guide
agcuuggccacauaugccaa

SEQ ID NO: 35381 - RNA, 20 nt, Artificial Sequence
  RPE65 RNA guide
aggaaauugagguucagagg

SEQ ID NO: 35382 - RNA, 20 nt, Artificial Sequence
  RPE65 RNA guide
aggacaacaugaacuuucua

SEQ ID NO: 35383 - RNA, 20 nt, Artificial Sequence
  RPE65 RNA guide
aggacacauagaauggccau

SEQ ID NO: 35384 - RNA, 20 nt, Artificial Sequence
  RPE65 RNA guide
aggacauugaaacauaggga

SEQ ID NO: 35385 - RNA, 20 nt, Artificial Sequence
  RPE65 RNA guide
aggacccccacccccaucac

SEQ ID NO: 35386 - RNA, 20 nt, Artificial Sequence
  RPE65 RNA guide
aggagcaauccguacagccc

SEQ ID NO: 35387 - RNA, 20 nt, Artificial Sequence
  RPE65 RNA guide
aggaguuaagugauuggcau

SEQ ID NO: 35388 - RNA, 20 nt, Artificial Sequence
  RPE65 RNA guide
aggauucuaacccagcuugg

SEQ ID NO: 35389 - RNA, 20 nt, Artificial Sequence
  RPE65 RNA guide
agggaagaguauagacagga

SEQ ID NO: 35390 - RNA, 20 nt, Artificial Sequence
  RPE65 RNA guide
agggacauugugucugcccu

SEQ ID NO: 35391 - RNA, 20 nt, Artificial Sequence
  RPE65 RNA guide
agggcagacacaaugucccu

SEQ ID NO: 35392 - RNA, 20 nt, Artificial Sequence
  RPE65 RNA guide
agggcugcauggugugauau

SEQ ID NO: 35393 - RNA, 20 nt, Artificial Sequence
  RPE65 RNA guide
aggguuuuauuagcucacuu

SEQ ID NO: 35394 - RNA, 20 nt, Artificial Sequence
  RPE65 RNA guide
aggugauggggguggggguc

SEQ ID NO: 35395 - RNA, 20 nt, Artificial Sequence
  RPE65 RNA guide
agguuauaggugaugggggu

SEQ ID NO: 35396 - RNA, 20 nt, Artificial Sequence
  RPE65 RNA guide
agguucagaggaguuaagug

SEQ ID NO: 35397 - RNA, 20 nt, Artificial Sequence
  RPE65 RNA guide
agguugauagguuauaggug

SEQ ID NO: 35398 - RNA, 20 nt, Artificial Sequence
  RPE65 RNA guide
aguauagacaggagcaaucc

SEQ ID NO: 35399 - RNA, 20 nt, Artificial Sequence
  RPE65 RNA guide
agucacaaucauaaaugcac

SEQ ID NO: 35400 - RNA, 20 nt, Artificial Sequence
  RPE65 RNA guide
agugauuggcauauguggcc

SEQ ID NO: 35401 - RNA, 20 nt, Artificial Sequence
  RPE65 RNA guide
aguuaagugauuggcauaug

SEQ ID NO: 35402 - RNA, 20 nt, Artificial Sequence
  RPE65 RNA guide
aguucacauaggacccccac

SEQ ID NO: 35403 - RNA, 20 nt, Artificial Sequence
  RPE65 RNA guide
aguucauguuguccugcucu

SEQ ID NO: 35404 - RNA, 20 nt, Artificial Sequence
  RPE65 RNA guide
aguuggccagagcaggacaa

SEQ ID NO: 35405 - RNA, 20 nt, Artificial Sequence
  RPE65 RNA guide
aguuuagguugauagguuau

SEQ ID NO: 35406 - RNA, 20 nt, Artificial Sequence
  RPE65 RNA guide
auaaaaacguaaacucaagg

SEQ ID NO: 35407 - RNA, 20 nt, Artificial Sequence
  RPE65 RNA guide
auaaaaguaacagagggaga

SEQ ID NO: 35408 - RNA, 20 nt, Artificial Sequence
  RPE65 RNA guide
auaauucagcacaccauguc

SEQ ID NO: 35409 - RNA, 20 nt, Artificial Sequence
  RPE65 RNA guide
auacucuucccuauguuuca

SEQ ID NO: 35410 - RNA, 20 nt, Artificial Sequence
  RPE65 RNA guide
auagaaaguucauguugucc

SEQ ID NO: 35411 - RNA, 20 nt, Artificial Sequence
  RPE65 RNA guide
auagaauggccauucuaagc

SEQ ID NO: 35412 - RNA, 20 nt, Artificial Sequence
  RPE65 RNA guide
auagacaggagcaauccgua

SEQ ID NO: 35413 - RNA, 20 nt, Artificial Sequence
  RPE65 RNA guide
auaggacccccacccccauc

SEQ ID NO: 35414 - RNA, 20 nt, Artificial Sequence
  RPE65 RNA guide
auagggaagaguauagacag

SEQ ID NO: 35415 - RNA, 20 nt, Artificial Sequence
  RPE65 RNA guide
auaggugauggggguggggg

SEQ ID NO: 35416 - RNA, 20 nt, Artificial Sequence
  RPE65 RNA guide
auagguuauaggugaugggg

SEQ ID NO: 35417 - RNA, 20 nt, Artificial Sequence
  RPE65 RNA guide
auauaauucagcacaccaug

SEQ ID NO: 35418 - RNA, 20 nt, Artificial Sequence
  RPE65 RNA guide
auauagaaaguucauguugu

SEQ ID NO: 35419 - RNA, 20 nt, Artificial Sequence
  RPE65 RNA guide
auaucacaccaugcagcccu

SEQ ID NO: 35420 - RNA, 20 nt, Artificial Sequence
  RPE65 RNA guide
auaugccaaucacuuaacuc

SEQ ID NO: 35421 - RNA, 20 nt, Artificial Sequence
  RPE65 RNA guide
auauguggccaagcuggguu

SEQ ID NO: 35422 - RNA, 20 nt, Artificial Sequence
  RPE65 RNA guide
aucaaccuaaacuuacuggg

SEQ ID NO: 35423 - RNA, 20 nt, Artificial Sequence
  RPE65 RNA guide
aucaagucacaaucauaaau

SEQ ID NO: 35424 - RNA, 20 nt, Artificial Sequence
  RPE65 RNA guide
aucacaccaugcagcccugg

SEQ ID NO: 35425 - RNA, 20 nt, Artificial Sequence
  RPE65 RNA guide
aucaccuauaaccuaucaac

SEQ ID NO: 35426 - RNA, 20 nt, Artificial Sequence
  RPE65 RNA guide
aucacuuaacuccucugaac

SEQ ID NO: 35427 - RNA, 20 nt, Artificial Sequence
  RPE65 RNA guide
auccguacagcccaugugga

SEQ ID NO: 35428 - RNA, 20 nt, Artificial Sequence
  RPE65 RNA guide
auccuaguuggccagagcag

SEQ ID NO: 35429 - RNA, 20 nt, Artificial Sequence
  RPE65 RNA guide
aucucccucuguuacuuuua

SEQ ID NO: 35430 - RNA, 20 nt, Artificial Sequence
  RPE65 RNA guide
aucuuuuaaaccucacagau

SEQ ID NO: 35431 - RNA, 20 nt, Artificial Sequence
  RPE65 RNA guide
augaacuuucuauaucacac

SEQ ID NO: 35432 - RNA, 20 nt, Artificial Sequence
  RPE65 RNA guide
augaggacacauagaauggc

SEQ ID NO: 35433 - RNA, 20 nt, Artificial Sequence
  RPE65 RNA guide
augauugugacuugaugagg

SEQ ID NO: 35434 - RNA, 20 nt, Artificial Sequence
  RPE65 RNA guide
augcacaacaugaagaauaa

SEQ ID NO: 35435 - RNA, 20 nt, Artificial Sequence
  RPE65 RNA guide
augcagcccugggggaaguu

SEQ ID NO: 35436 - RNA, 20 nt, Artificial Sequence
  RPE65 RNA guide
augccaaucacuuaacuccu

SEQ ID NO: 35437 - RNA, 20 nt, Artificial Sequence
  RPE65 RNA guide
auggccauucuaagcuccac

SEQ ID NO: 35438 - RNA, 20 nt, Artificial Sequence
  RPE65 RNA guide
auggccauucuauguguccu

SEQ ID NO: 35439 - RNA, 20 nt, Artificial Sequence
  RPE65 RNA guide
augggcuguacggauugcuc

SEQ ID NO: 35440 - RNA, 20 nt, Artificial Sequence
  RPE65 RNA guide
auggggguggggguccuaug

SEQ ID NO: 35441 - RNA, 20 nt, Artificial Sequence
  RPE65 RNA guide
auggugugauauagaaaguu

SEQ ID NO: 35442 - RNA, 20 nt, Artificial Sequence
  RPE65 RNA guide
augucccuugaguuuacguu

SEQ ID NO: 35443 - RNA, 20 nt, Artificial Sequence
  RPE65 RNA guide
auguccggaauuuucccagu

SEQ ID NO: 35444 - RNA, 20 nt, Artificial Sequence
  RPE65 RNA guide
augugaacuucccccagggc

SEQ ID NO: 35445 - RNA, 20 nt, Artificial Sequence
  RPE65 RNA guide
auguggagcuuagaauggcc

SEQ ID NO: 35446 - RNA, 20 nt, Artificial Sequence
  RPE65 RNA guide
auguggccaagcuggguuag

SEQ ID NO: 35447 - RNA, 20 nt, Artificial Sequence
  RPE65 RNA guide
auguguccucaucaagucac

SEQ ID NO: 35448 - RNA, 20 nt, Artificial Sequence
  RPE65 RNA guide
auguuguccugcucuggcca

SEQ ID NO: 35449 - RNA, 20 nt, Artificial Sequence
  RPE65 RNA guide
auguugugcauuuaugauug

SEQ ID NO: 35450 - RNA, 20 nt, Artificial Sequence
  RPE65 RNA guide
auuagcucacuuucuugggg

SEQ ID NO: 35451 - RNA, 20 nt, Artificial Sequence
  RPE65 RNA guide
auuauauucuucucaaucuc

SEQ ID NO: 35452 - RNA, 20 nt, Artificial Sequence
  RPE65 RNA guide
auucagcacaccauguccgg

SEQ ID NO: 35453 - RNA, 20 nt, Artificial Sequence
  RPE65 RNA guide
auuccggacauggugugcug

SEQ ID NO: 35454 - RNA, 20 nt, Artificial Sequence
  RPE65 RNA guide
auucuaacccagcuuggcca

SEQ ID NO: 35455 - RNA, 20 nt, Artificial Sequence
  RPE65 RNA guide
auucuaagcuccacaugggc

SEQ ID NO: 35456 - RNA, 20 nt, Artificial Sequence
  RPE65 RNA guide
auucuauguguccucaucaa

SEQ ID NO: 35457 - RNA, 20 nt, Artificial Sequence
  RPE65 RNA guide
auugaaacauagggaagagu

SEQ ID NO: 35458 - RNA, 20 nt, Artificial Sequence
  RPE65 RNA guide
auugagguucagaggaguua

SEQ ID NO: 35459 - RNA, 20 nt, Artificial Sequence
  RPE65 RNA guide
auugcuccugucuauacucu

SEQ ID NO: 35460 - RNA, 20 nt, Artificial Sequence
  RPE65 RNA guide
auuggcauauguggccaagc

SEQ ID NO: 35461 - RNA, 20 nt, Artificial Sequence
  RPE65 RNA guide
auugugacuugaugaggaca

SEQ ID NO: 35462 - RNA, 20 nt, Artificial Sequence
  RPE65 RNA guide
auugugucugcccugcuugg

SEQ ID NO: 35463 - RNA, 20 nt, Artificial Sequence
  RPE65 RNA guide
auuuaugauugugacuugau

SEQ ID NO: 35464 - RNA, 20 nt, Artificial Sequence
  RPE65 RNA guide
auuuccucaucugugagguu

SEQ ID NO: 35465 - RNA, 20 nt, Artificial Sequence
  RPE65 RNA guide
auuuucccaguaaguuuagg

SEQ ID NO: 35466 - RNA, 20 nt, Artificial Sequence
  RPE65 RNA guide
caacaugaacuuucuauauc

SEQ ID NO: 35467 - RNA, 20 nt, Artificial Sequence
  RPE65 RNA guide
caaccuaaacuuacugggaa

SEQ ID NO: 35468 - RNA, 20 nt, Artificial Sequence
  RPE65 RNA guide
caacuaggauucuaacccag

SEQ ID NO: 35469 - RNA, 20 nt, Artificial Sequence
  RPE65 RNA guide
caagaaagugagcuaauaaa

SEQ ID NO: 35470 - RNA, 20 nt, Artificial Sequence
  RPE65 RNA guide
caagcagggcagacacaaug

SEQ ID NO: 35471 - RNA, 20 nt, Artificial Sequence
  RPE65 RNA guide
caagcuggguuagaauccua

SEQ ID NO: 35472 - RNA, 20 nt, Artificial Sequence
  RPE65 RNA guide
caagggacauugugucugcc

SEQ ID NO: 35473 - RNA, 20 nt, Artificial Sequence
  RPE65 RNA guide
caagucacaaucauaaaugc

SEQ ID NO: 35474 - RNA, 20 nt, Artificial Sequence
  RPE65 RNA guide
caaucacuuaacuccucuga

SEQ ID NO: 35475 - RNA, 20 nt, Artificial Sequence
  RPE65 RNA guide
caaucauaaaugcacaacau

SEQ ID NO: 35476 - RNA, 20 nt, Artificial Sequence
  RPE65 RNA guide
caauccguacagcccaugug

SEQ ID NO: 35477 - RNA, 20 nt, Artificial Sequence
  RPE65 RNA guide
caaucucccucuguuacuuu

SEQ ID NO: 35478 - RNA, 20 nt, Artificial Sequence
  RPE65 RNA guide
caaugucccuugaguuuacg

SEQ ID NO: 35479 - RNA, 20 nt, Artificial Sequence
  RPE65 RNA guide
caauuuccucaucugugagg

SEQ ID NO: 35480 - RNA, 20 nt, Artificial Sequence
  RPE65 RNA guide
cacaacaugaagaauaaagg

SEQ ID NO: 35481 - RNA, 20 nt, Artificial Sequence
  RPE65 RNA guide
cacaaucauaaaugcacaac

SEQ ID NO: 35482 - RNA, 20 nt, Artificial Sequence
  RPE65 RNA guide
cacaaugucccuugaguuua

SEQ ID NO: 35483 - RNA, 20 nt, Artificial Sequence
  RPE65 RNA guide
cacaccaugcagcccugggg

SEQ ID NO: 35484 - RNA, 20 nt, Artificial Sequence
  RPE65 RNA guide
cacaccauguccggaauuuu

SEQ ID NO: 35485 - RNA, 20 nt, Artificial Sequence
  RPE65 RNA guide
cacauagaauggccauucua

SEQ ID NO: 35486 - RNA, 20 nt, Artificial Sequence
  RPE65 RNA guide
cacauaggacccccaccccc

SEQ ID NO: 35487 - RNA, 20 nt, Artificial Sequence
  RPE65 RNA guide
cacauaugccaaucacuuaa

SEQ ID NO: 35488 - RNA, 20 nt, Artificial Sequence
  RPE65 RNA guide
cacaugggcuguacggauug

SEQ ID NO: 35489 - RNA, 20 nt, Artificial Sequence
  RPE65 RNA guide
caccaugcagcccuggggga

SEQ ID NO: 35490 - RNA, 20 nt, Artificial Sequence
  RPE65 RNA guide
caccauguccggaauuuucc

SEQ ID NO: 35491 - RNA, 20 nt, Artificial Sequence
  RPE65 RNA guide
caccccaagaaagugagcua

SEQ ID NO: 35492 - RNA, 20 nt, Artificial Sequence
  RPE65 RNA guide
cacccccaucaccuauaacc

SEQ ID NO: 35493 - RNA, 20 nt, Artificial Sequence
  RPE65 RNA guide
caccuauaaccuaucaaccu

SEQ ID NO: 35494 - RNA, 20 nt, Artificial Sequence
  RPE65 RNA guide
cacuuaacuccucugaaccu

SEQ ID NO: 35495 - RNA, 20 nt, Artificial Sequence
  RPE65 RNA guide
cacuuucuuggggugaccaa

SEQ ID NO: 35496 - RNA, 20 nt, Artificial Sequence
  RPE65 RNA guide
cagacacaaugucccuugag

SEQ ID NO: 35497 - RNA, 20 nt, Artificial Sequence
  RPE65 RNA guide
cagagcaggacaacaugaac

SEQ ID NO: 35498 - RNA, 20 nt, Artificial Sequence
  RPE65 RNA guide
cagaggaguuaagugauugg

SEQ ID NO: 35499 - RNA, 20 nt, Artificial Sequence
  RPE65 RNA guide
cagcacaccauguccggaau

SEQ ID NO: 35500 - RNA, 20 nt, Artificial Sequence
  RPE65 RNA guide
cagcccauguggagcuuaga

SEQ ID NO: 35501 - RNA, 20 nt, Artificial Sequence
  RPE65 RNA guide
cagcccugggggaaguucac

SEQ ID NO: 35502 - RNA, 20 nt, Artificial Sequence
  RPE65 RNA guide
cagcuuggccacauaugcca

SEQ ID NO: 35503 - RNA, 20 nt, Artificial Sequence
  RPE65 RNA guide
caggacaacaugaacuuucu

SEQ ID NO: 35504 - RNA, 20 nt, Artificial Sequence
  RPE65 RNA guide
caggagcaauccguacagcc

SEQ ID NO: 35505 - RNA, 20 nt, Artificial Sequence
  RPE65 RNA guide
cagggcagacacaauguccc

SEQ ID NO: 35506 - RNA, 20 nt, Artificial Sequence
  RPE65 RNA guide
cagggcugcauggugugaua

SEQ ID NO: 35507 - RNA, 20 nt, Artificial Sequence
  RPE65 RNA guide
caguaaguuuagguugauag

SEQ ID NO: 35508 - RNA, 20 nt, Artificial Sequence
  RPE65 RNA guide
cauaaaaguaacagagggag

SEQ ID NO: 35509 - RNA, 20 nt, Artificial Sequence
  RPE65 RNA guide
cauagaauggccauucuaag

SEQ ID NO: 35510 - RNA, 20 nt, Artificial Sequence
  RPE65 RNA guide
cauaggacccccacccccau

SEQ ID NO: 35511 - RNA, 20 nt, Artificial Sequence
  RPE65 RNA guide
cauagggaagaguauagaca

SEQ ID NO: 35512 - RNA, 20 nt, Artificial Sequence
  RPE65 RNA guide
cauaugccaaucacuuaacu

SEQ ID NO: 35513 - RNA, 20 nt, Artificial Sequence
  RPE65 RNA guide
cauauguggccaagcugggu

SEQ ID NO: 35514 - RNA, 20 nt, Artificial Sequence
  RPE65 RNA guide
caucaagucacaaucauaaa

SEQ ID NO: 35515 - RNA, 20 nt, Artificial Sequence
  RPE65 RNA guide
caucaccuauaaccuaucaa

SEQ ID NO: 35516 - RNA, 20 nt, Artificial Sequence
  RPE65 RNA guide
caugaacuuucuauaucaca

SEQ ID NO: 35517 - RNA, 20 nt, Artificial Sequence
  RPE65 RNA guide
caugcagcccugggggaagu

SEQ ID NO: 35518 - RNA, 20 nt, Artificial Sequence
  RPE65 RNA guide
caugggcuguacggauugcu

SEQ ID NO: 35519 - RNA, 20 nt, Artificial Sequence
  RPE65 RNA guide
cauggugugauauagaaagu

SEQ ID NO: 35520 - RNA, 20 nt, Artificial Sequence
  RPE65 RNA guide
cauguccggaauuuucccag

SEQ ID NO: 35521 - RNA, 20 nt, Artificial Sequence
  RPE65 RNA guide
cauguggagcuuagaauggc

SEQ ID NO: 35522 - RNA, 20 nt, Artificial Sequence
  RPE65 RNA guide
cauguuguccugcucuggcc

SEQ ID NO: 35523 - RNA, 20 nt, Artificial Sequence
  RPE65 RNA guide
cauguugugcauuuaugauu

SEQ ID NO: 35524 - RNA, 20 nt, Artificial Sequence
  RPE65 RNA guide
cauucuaagcuccacauggg

SEQ ID NO: 35525 - RNA, 20 nt, Artificial Sequence
  RPE65 RNA guide
cauucuauguguccucauca

SEQ ID NO: 35526 - RNA, 20 nt, Artificial Sequence
  RPE65 RNA guide
cauugaaacauagggaagag

SEQ ID NO: 35527 - RNA, 20 nt, Artificial Sequence
  RPE65 RNA guide
cauugugucugcccugcuug

SEQ ID NO: 35528 - RNA, 20 nt, Artificial Sequence
  RPE65 RNA guide
cauuuaugauugugacuuga

SEQ ID NO: 35529 - RNA, 20 nt, Artificial Sequence
  RPE65 RNA guide
ccaacuaggauucuaaccca

SEQ ID NO: 35530 - RNA, 20 nt, Artificial Sequence
  RPE65 RNA guide
ccaagaaagugagcuaauaa

SEQ ID NO: 35531 - RNA, 20 nt, Artificial Sequence
  RPE65 RNA guide
ccaagcagggcagacacaau

SEQ ID NO: 35532 - RNA, 20 nt, Artificial Sequence
  RPE65 RNA guide
ccaagcuggguuagaauccu

SEQ ID NO: 35533 - RNA, 20 nt, Artificial Sequence
  RPE65 RNA guide
ccaaucacuuaacuccucug

SEQ ID NO: 35534 - RNA, 20 nt, Artificial Sequence
  RPE65 RNA guide
ccacauaugccaaucacuua

SEQ ID NO: 35535 - RNA, 20 nt, Artificial Sequence
  RPE65 RNA guide
ccacaugggcuguacggauu

SEQ ID NO: 35536 - RNA, 20 nt, Artificial Sequence
  RPE65 RNA guide
ccacccccaucaccuauaac

SEQ ID NO: 35537 - RNA, 20 nt, Artificial Sequence
  RPE65 RNA guide
ccagagcaggacaacaugaa

SEQ ID NO: 35538 - RNA, 20 nt, Artificial Sequence
  RPE65 RNA guide
ccagcuuggccacauaugcc

SEQ ID NO: 35539 - RNA, 20 nt, Artificial Sequence
  RPE65 RNA guide
ccagggcugcauggugugau

SEQ ID NO: 35540 - RNA, 20 nt, Artificial Sequence
  RPE65 RNA guide
ccaguaaguuuagguugaua

SEQ ID NO: 35541 - RNA, 20 nt, Artificial Sequence
  RPE65 RNA guide
ccaucaccuauaaccuauca

SEQ ID NO: 35542 - RNA, 20 nt, Artificial Sequence
  RPE65 RNA guide
ccaugcagcccugggggaag

SEQ ID NO: 35543 - RNA, 20 nt, Artificial Sequence
  RPE65 RNA guide
ccauguccggaauuuuccca

SEQ ID NO: 35544 - RNA, 20 nt, Artificial Sequence
  RPE65 RNA guide
ccauguggagcuuagaaugg

SEQ ID NO: 35545 - RNA, 20 nt, Artificial Sequence
  RPE65 RNA guide
ccauucuaagcuccacaugg

SEQ ID NO: 35546 - RNA, 20 nt, Artificial Sequence
  RPE65 RNA guide
ccauucuauguguccucauc

SEQ ID NO: 35547 - RNA, 20 nt, Artificial Sequence
  RPE65 RNA guide
cccaagaaagugagcuaaua

SEQ ID NO: 35548 - RNA, 20 nt, Artificial Sequence
  RPE65 RNA guide
cccacccccaucaccuauaa

SEQ ID NO: 35549 - RNA, 20 nt, Artificial Sequence
  RPE65 RNA guide
cccagcuuggccacauaugc

SEQ ID NO: 35550 - RNA, 20 nt, Artificial Sequence
  RPE65 RNA guide
cccagggcugcaugguguga

SEQ ID NO: 35551 - RNA, 20 nt, Artificial Sequence
  RPE65 RNA guide
cccaguaaguuuagguugau

SEQ ID NO: 35552 - RNA, 20 nt, Artificial Sequence
  RPE65 RNA guide
cccaucaccuauaaccuauc

SEQ ID NO: 35553 - RNA, 20 nt, Artificial Sequence
  RPE65 RNA guide
cccauguggagcuuagaaug

SEQ ID NO: 35554 - RNA, 20 nt, Artificial Sequence
  RPE65 RNA guide
ccccaagaaagugagcuaau

SEQ ID NO: 35555 - RNA, 20 nt, Artificial Sequence
  RPE65 RNA guide
ccccacccccaucaccuaua

SEQ ID NO: 35556 - RNA, 20 nt, Artificial Sequence
  RPE65 RNA guide
ccccagggcugcauggugug

SEQ ID NO: 35557 - RNA, 20 nt, Artificial Sequence
  RPE65 RNA guide
ccccaucaccuauaaccuau

SEQ ID NO: 35558 - RNA, 20 nt, Artificial Sequence
  RPE65 RNA guide
cccccacccccaucaccuau

SEQ ID NO: 35559 - RNA, 20 nt, Artificial Sequence
  RPE65 RNA guide
cccccagggcugcauggugu

SEQ ID NO: 35560 - RNA, 20 nt, Artificial Sequence
  RPE65 RNA guide
cccccaucaccuauaaccua

SEQ ID NO: 35561 - RNA, 20 nt, Artificial Sequence
  RPE65 RNA guide
cccucuguuacuuuuauguu

SEQ ID NO: 35562 - RNA, 20 nt, Artificial Sequence
  RPE65 RNA guide
cccugcuuggucaccccaag

SEQ ID NO: 35563 - RNA, 20 nt, Artificial Sequence
  RPE65 RNA guide
cccugggggaaguucacaua

SEQ ID NO: 35564 - RNA, 20 nt, Artificial Sequence
  RPE65 RNA guide
cccuugaguuuacguuuuua

SEQ ID NO: 35565 - RNA, 20 nt, Artificial Sequence
  RPE65 RNA guide
cccuuuauucuucauguugu

SEQ ID NO: 35566 - RNA, 20 nt, Artificial Sequence
  RPE65 RNA guide
ccggaauuuucccaguaagu

SEQ ID NO: 35567 - RNA, 20 nt, Artificial Sequence
  RPE65 RNA guide
ccggacauggugugcugaau

SEQ ID NO: 35568 - RNA, 20 nt, Artificial Sequence
  RPE65 RNA guide
ccguacagcccauguggagc

SEQ ID NO: 35569 - RNA, 20 nt, Artificial Sequence
  RPE65 RNA guide
ccuaaacuuacugggaaaau

SEQ ID NO: 35570 - RNA, 20 nt, Artificial Sequence
  RPE65 RNA guide
ccuaguuggccagagcagga

SEQ ID NO: 35571 - RNA, 20 nt, Artificial Sequence
  RPE65 RNA guide
ccuauaaccuaucaaccuaa

SEQ ID NO: 35572 - RNA, 20 nt, Artificial Sequence
  RPE65 RNA guide
ccuaucaaccuaaacuuacu

SEQ ID NO: 35573 - RNA, 20 nt, Artificial Sequence
  RPE65 RNA guide
ccuaugugaacuucccccag

SEQ ID NO: 35574 - RNA, 20 nt, Artificial Sequence
  RPE65 RNA guide
ccucaauuuccucaucugug

SEQ ID NO: 35575 - RNA, 20 nt, Artificial Sequence
  RPE65 RNA guide
ccucacagaugaggaaauug

SEQ ID NO: 35576 - RNA, 20 nt, Artificial Sequence
  RPE65 RNA guide
ccucaucaagucacaaucau

SEQ ID NO: 35577 - RNA, 20 nt, Artificial Sequence
  RPE65 RNA guide
ccucaucugugagguuuaaa

SEQ ID NO: 35578 - RNA, 20 nt, Artificial Sequence
  RPE65 RNA guide
ccugcucuggccaacuagga

SEQ ID NO: 35579 - RNA, 20 nt, Artificial Sequence
  RPE65 RNA guide
ccugcuuggucaccccaaga

SEQ ID NO: 35580 - RNA, 20 nt, Artificial Sequence
  RPE65 RNA guide
ccugggggaaguucacauag

SEQ ID NO: 35581 - RNA, 20 nt, Artificial Sequence
  RPE65 RNA guide
ccugucuauacucuucccua

SEQ ID NO: 35582 - RNA, 20 nt, Artificial Sequence
  RPE65 RNA guide
ccuuuauucuucauguugug

SEQ ID NO: 35583 - RNA, 20 nt, Artificial Sequence
  RPE65 RNA guide
cggaauuuucccaguaaguu

SEQ ID NO: 35584 - RNA, 20 nt, Artificial Sequence
  RPE65 RNA guide
cggacauggugugcugaauu

SEQ ID NO: 35585 - RNA, 20 nt, Artificial Sequence
  RPE65 RNA guide
cggauugcuccugucuauac

SEQ ID NO: 35586 - RNA, 20 nt, Artificial Sequence
  RPE65 RNA guide
cguaaacucaagggacauug

SEQ ID NO: 35587 - RNA, 20 nt, Artificial Sequence
  RPE65 RNA guide
cguacagcccauguggagcu

SEQ ID NO: 35588 - RNA, 20 nt, Artificial Sequence
  RPE65 RNA guide
cuaaacuuacugggaaaauu

SEQ ID NO: 35589 - RNA, 20 nt, Artificial Sequence
  RPE65 RNA guide
cuaacccagcuuggccacau

SEQ ID NO: 35590 - RNA, 20 nt, Artificial Sequence
  RPE65 RNA guide
cuaagcuccacaugggcugu

SEQ ID NO: 35591 - RNA, 20 nt, Artificial Sequence
  RPE65 RNA guide
cuaggauucuaacccagcuu

SEQ ID NO: 35592 - RNA, 20 nt, Artificial Sequence
  RPE65 RNA guide
cuaguuggccagagcaggac

SEQ ID NO: 35593 - RNA, 20 nt, Artificial Sequence
  RPE65 RNA guide
cuauacucuucccuauguuu

SEQ ID NO: 35594 - RNA, 20 nt, Artificial Sequence
  RPE65 RNA guide
cuauaucacaccaugcagcc

SEQ ID NO: 35595 - RNA, 20 nt, Artificial Sequence
  RPE65 RNA guide
cuaucaaccuaaacuuacug

SEQ ID NO: 35596 - RNA, 20 nt, Artificial Sequence
  RPE65 RNA guide
cuaugugaacuucccccagg

SEQ ID NO: 35597 - RNA, 20 nt, Artificial Sequence
  RPE65 RNA guide
cuauguguccucaucaaguc

SEQ ID NO: 35598 - RNA, 20 nt, Artificial Sequence
  RPE65 RNA guide
cucaagggacauugugucug

SEQ ID NO: 35599 - RNA, 20 nt, Artificial Sequence
  RPE65 RNA guide
cucaaucucccucuguuacu

SEQ ID NO: 35600 - RNA, 20 nt, Artificial Sequence
  RPE65 RNA guide
cucaauuuccucaucuguga

SEQ ID NO: 35601 - RNA, 20 nt, Artificial Sequence
  RPE65 RNA guide
cucacagaugaggaaauuga

SEQ ID NO: 35602 - RNA, 20 nt, Artificial Sequence
  RPE65 RNA guide
cucacuuucuuggggugacc

SEQ ID NO: 35603 - RNA, 20 nt, Artificial Sequence
  RPE65 RNA guide
cucaucaagucacaaucaua

SEQ ID NO: 35604 - RNA, 20 nt, Artificial Sequence
  RPE65 RNA guide
cucaucugugagguuuaaaa

SEQ ID NO: 35605 - RNA, 20 nt, Artificial Sequence
  RPE65 RNA guide
cuccacaugggcuguacgga

SEQ ID NO: 35606 - RNA, 20 nt, Artificial Sequence
  RPE65 RNA guide
cucccucuguuacuuuuaug

SEQ ID NO: 35607 - RNA, 20 nt, Artificial Sequence
  RPE65 RNA guide
cuccucugaaccucaauuuc

SEQ ID NO: 35608 - RNA, 20 nt, Artificial Sequence
  RPE65 RNA guide
cuccugucuauacucuuccc

SEQ ID NO: 35609 - RNA, 20 nt, Artificial Sequence
  RPE65 RNA guide
cucuggccaacuaggauucu

SEQ ID NO: 35610 - RNA, 20 nt, Artificial Sequence
  RPE65 RNA guide
cucuucccuauguuucaaug

SEQ ID NO: 35611 - RNA, 20 nt, Artificial Sequence
  RPE65 RNA guide
cugaaggacauugaaacaua

SEQ ID NO: 35612 - RNA, 20 nt, Artificial Sequence
  RPE65 RNA guide
cugcauggugugauauagaa

SEQ ID NO: 35613 - RNA, 20 nt, Artificial Sequence
  RPE65 RNA guide
cugcccugcuuggucacccc

SEQ ID NO: 35614 - RNA, 20 nt, Artificial Sequence
  RPE65 RNA guide
cugcucuggccaacuaggau

SEQ ID NO: 35615 - RNA, 20 nt, Artificial Sequence
  RPE65 RNA guide
cugcuuggucaccccaagaa

SEQ ID NO: 35616 - RNA, 20 nt, Artificial Sequence
  RPE65 RNA guide
cuggccaacuaggauucuaa

SEQ ID NO: 35617 - RNA, 20 nt, Artificial Sequence
  RPE65 RNA guide
cugggaaaauuccggacaug

SEQ ID NO: 35618 - RNA, 20 nt, Artificial Sequence
  RPE65 RNA guide
cugggggaaguucacauagg

SEQ ID NO: 35619 - RNA, 20 nt, Artificial Sequence
  RPE65 RNA guide
cuggguuagaauccuaguug

SEQ ID NO: 35620 - RNA, 20 nt, Artificial Sequence
  RPE65 RNA guide
cuguacggauugcuccuguc

SEQ ID NO: 35621 - RNA, 20 nt, Artificial Sequence
  RPE65 RNA guide
cugucuauacucuucccuau

SEQ ID NO: 35622 - RNA, 20 nt, Artificial Sequence
  RPE65 RNA guide
cuuaacuccucugaaccuca

SEQ ID NO: 35623 - RNA, 20 nt, Artificial Sequence
  RPE65 RNA guide
cuuacugggaaaauuccgga

SEQ ID NO: 35624 - RNA, 20 nt, Artificial Sequence
  RPE65 RNA guide
cuuagaauggccauucuaug

SEQ ID NO: 35625 - RNA, 20 nt, Artificial Sequence
  RPE65 RNA guide
cuucauguugugcauuuaug

SEQ ID NO: 35626 - RNA, 20 nt, Artificial Sequence
  RPE65 RNA guide
cuucccccagggcugcaugg

SEQ ID NO: 35627 - RNA, 20 nt, Artificial Sequence
  RPE65 RNA guide
cuucccuauguuucaauguc

SEQ ID NO: 35628 - RNA, 20 nt, Artificial Sequence
  RPE65 RNA guide
cuucucaaucucccucuguu

SEQ ID NO: 35629 - RNA, 20 nt, Artificial Sequence
  RPE65 RNA guide
cuugaugaggacacauagaa

SEQ ID NO: 35630 - RNA, 20 nt, Artificial Sequence
  RPE65 RNA guide
cuuggccacauaugccaauc

SEQ ID NO: 35631 - RNA, 20 nt, Artificial Sequence
  RPE65 RNA guide
cuuggggugaccaagcaggg

SEQ ID NO: 35632 - RNA, 20 nt, Artificial Sequence
  RPE65 RNA guide
cuuggucaccccaagaaagu

SEQ ID NO: 35633 - RNA, 20 nt, Artificial Sequence
  RPE65 RNA guide
cuuucuauaucacaccaugc

SEQ ID NO: 35634 - RNA, 20 nt, Artificial Sequence
  RPE65 RNA guide
cuuucuuggggugaccaagc

SEQ ID NO: 35635 - RNA, 20 nt, Artificial Sequence
  RPE65 RNA guide
cuuuuaaaccucacagauga

SEQ ID NO: 35636 - RNA, 20 nt, Artificial Sequence
  RPE65 RNA guide
gaaaaacauaaaaguaacag

SEQ ID NO: 35637 - RNA, 20 nt, Artificial Sequence
  RPE65 RNA guide
gaaaauuccggacauggugu

SEQ ID NO: 35638 - RNA, 20 nt, Artificial Sequence
  RPE65 RNA guide
gaaacauagggaagaguaua

SEQ ID NO: 35639 - RNA, 20 nt, Artificial Sequence
  RPE65 RNA guide
gaaagugagcuaauaaaacc

SEQ ID NO: 35640 - RNA, 20 nt, Artificial Sequence
  RPE65 RNA guide
gaaaguucauguuguccugc

SEQ ID NO: 35641 - RNA, 20 nt, Artificial Sequence
  RPE65 RNA guide
gaaauugagguucagaggag

SEQ ID NO: 35642 - RNA, 20 nt, Artificial Sequence
  RPE65 RNA guide
gaacuucccccagggcugca

SEQ ID NO: 35643 - RNA, 20 nt, Artificial Sequence
  RPE65 RNA guide
gaacuuucuauaucacacca

SEQ ID NO: 35644 - RNA, 20 nt, Artificial Sequence
  RPE65 RNA guide
gaagaguauagacaggagca

SEQ ID NO: 35645 - RNA, 20 nt, Artificial Sequence
  RPE65 RNA guide
gaaggacauugaaacauagg

SEQ ID NO: 35646 - RNA, 20 nt, Artificial Sequence
  RPE65 RNA guide
gaaguucacauaggaccccc

SEQ ID NO: 35647 - RNA, 20 nt, Artificial Sequence
  RPE65 RNA guide
gaauaaaggguuuuauuagc

SEQ ID NO: 35648 - RNA, 20 nt, Artificial Sequence
  RPE65 RNA guide
gaauauaauucagcacacca

SEQ ID NO: 35649 - RNA, 20 nt, Artificial Sequence
  RPE65 RNA guide
gaauccuaguuggccagagc

SEQ ID NO: 35650 - RNA, 20 nt, Artificial Sequence
  RPE65 RNA guide
gaauggccauucuaagcucc

SEQ ID NO: 35651 - RNA, 20 nt, Artificial Sequence
  RPE65 RNA guide
gaauggccauucuauguguc

SEQ ID NO: 35652 - RNA, 20 nt, Artificial Sequence
  RPE65 RNA guide
gaauuauauucuucucaauc

SEQ ID NO: 35653 - RNA, 20 nt, Artificial Sequence
  RPE65 RNA guide
gaauuuucccaguaaguuua

SEQ ID NO: 35654 - RNA, 20 nt, Artificial Sequence
  RPE65 RNA guide
gacaacaugaacuuucuaua

SEQ ID NO: 35655 - RNA, 20 nt, Artificial Sequence
  RPE65 RNA guide
gacacaaugucccuugaguu

SEQ ID NO: 35656 - RNA, 20 nt, Artificial Sequence
  RPE65 RNA guide
gacacauagaauggccauuc

SEQ ID NO: 35657 - RNA, 20 nt, Artificial Sequence
  RPE65 RNA guide
gacaggagcaauccguacag

SEQ ID NO: 35658 - RNA, 20 nt, Artificial Sequence
  RPE65 RNA guide
gacauugaaacauagggaag

SEQ ID NO: 35659 - RNA, 20 nt, Artificial Sequence
  RPE65 RNA guide
gacauugugucugcccugcu

SEQ ID NO: 35660 - RNA, 20 nt, Artificial Sequence
  RPE65 RNA guide
gaccaagcagggcagacaca

SEQ ID NO: 35661 - RNA, 20 nt, Artificial Sequence
  RPE65 RNA guide
gacccccacccccaucaccu

SEQ ID NO: 35662 - RNA, 20 nt, Artificial Sequence
  RPE65 RNA guide
gacuugaugaggacacauag

SEQ ID NO: 35663 - RNA, 20 nt, Artificial Sequence
  RPE65 RNA guide
gagcaauccguacagcccau

SEQ ID NO: 35664 - RNA, 20 nt, Artificial Sequence
  RPE65 RNA guide
gagcaggacaacaugaacuu

SEQ ID NO: 35665 - RNA, 20 nt, Artificial Sequence
  RPE65 RNA guide
gagcuuagaauggccauucu

SEQ ID NO: 35666 - RNA, 20 nt, Artificial Sequence
  RPE65 RNA guide
gaggaaauugagguucagag

SEQ ID NO: 35667 - RNA, 20 nt, Artificial Sequence
  RPE65 RNA guide
gaggacacauagaauggcca

SEQ ID NO: 35668 - RNA, 20 nt, Artificial Sequence
  RPE65 RNA guide
gaggaguuaagugauuggca

SEQ ID NO: 35669 - RNA, 20 nt, Artificial Sequence
  RPE65 RNA guide
gagguucagaggaguuaagu

SEQ ID NO: 35670 - RNA, 20 nt, Artificial Sequence
  RPE65 RNA guide
gaguauagacaggagcaauc

SEQ ID NO: 35671 - RNA, 20 nt, Artificial Sequence
  RPE65 RNA guide
gaguuaagugauuggcauau

SEQ ID NO: 35672 - RNA, 20 nt, Artificial Sequence
  RPE65 RNA guide
gauaaaaacguaaacucaag

SEQ ID NO: 35673 - RNA, 20 nt, Artificial Sequence
  RPE65 RNA guide
gauagguuauaggugauggg

SEQ ID NO: 35674 - RNA, 20 nt, Artificial Sequence
  RPE65 RNA guide
gauauagaaaguucauguug

SEQ ID NO: 35675 - RNA, 20 nt, Artificial Sequence
  RPE65 RNA guide
gaugaggacacauagaaugg

SEQ ID NO: 35676 - RNA, 20 nt, Artificial Sequence
  RPE65 RNA guide
gauggggguggggguccuau

SEQ ID NO: 35677 - RNA, 20 nt, Artificial Sequence
  RPE65 RNA guide
gauucuaacccagcuuggcc

SEQ ID NO: 35678 - RNA, 20 nt, Artificial Sequence
  RPE65 RNA guide
gauugcuccugucuauacuc

SEQ ID NO: 35679 - RNA, 20 nt, Artificial Sequence
  RPE65 RNA guide
gauuggcauauguggccaag

SEQ ID NO: 35680 - RNA, 20 nt, Artificial Sequence
  RPE65 RNA guide
gauugugacuugaugaggac

SEQ ID NO: 35681 - RNA, 20 nt, Artificial Sequence
  RPE65 RNA guide
gcaauccguacagcccaugu

SEQ ID NO: 35682 - RNA, 20 nt, Artificial Sequence
  RPE65 RNA guide
gcacaacaugaagaauaaag

SEQ ID NO: 35683 - RNA, 20 nt, Artificial Sequence
  RPE65 RNA guide
gcacaccauguccggaauuu

SEQ ID NO: 35684 - RNA, 20 nt, Artificial Sequence
  RPE65 RNA guide
gcagacacaaugucccuuga

SEQ ID NO: 35685 - RNA, 20 nt, Artificial Sequence
  RPE65 RNA guide
gcagcccugggggaaguuca

SEQ ID NO: 35686 - RNA, 20 nt, Artificial Sequence
  RPE65 RNA guide
gcaggacaacaugaacuuuc

SEQ ID NO: 35687 - RNA, 20 nt, Artificial Sequence
  RPE65 RNA guide
gcagggcagacacaaugucc

SEQ ID NO: 35688 - RNA, 20 nt, Artificial Sequence
  RPE65 RNA guide
gcauauguggccaagcuggg

SEQ ID NO: 35689 - RNA, 20 nt, Artificial Sequence
  RPE65 RNA guide
gcauggugugauauagaaag

SEQ ID NO: 35690 - RNA, 20 nt, Artificial Sequence
  RPE65 RNA guide
gcauuuaugauugugacuug

SEQ ID NO: 35691 - RNA, 20 nt, Artificial Sequence
  RPE65 RNA guide
gccaacuaggauucuaaccc

SEQ ID NO: 35692 - RNA, 20 nt, Artificial Sequence
  RPE65 RNA guide
gccaagcuggguuagaaucc

SEQ ID NO: 35693 - RNA, 20 nt, Artificial Sequence
  RPE65 RNA guide
gccaaucacuuaacuccucu

SEQ ID NO: 35694 - RNA, 20 nt, Artificial Sequence
  RPE65 RNA guide
gccacauaugccaaucacuu

SEQ ID NO: 35695 - RNA, 20 nt, Artificial Sequence
  RPE65 RNA guide
gccagagcaggacaacauga

SEQ ID NO: 35696 - RNA, 20 nt, Artificial Sequence
  RPE65 RNA guide
gccauucuaagcuccacaug

SEQ ID NO: 35697 - RNA, 20 nt, Artificial Sequence
  RPE65 RNA guide
gccauucuauguguccucau

SEQ ID NO: 35698 - RNA, 20 nt, Artificial Sequence
  RPE65 RNA guide
gcccauguggagcuuagaau

SEQ ID NO: 35699 - RNA, 20 nt, Artificial Sequence
  RPE65 RNA guide
gcccugcuuggucaccccaa

SEQ ID NO: 35700 - RNA, 20 nt, Artificial Sequence
  RPE65 RNA guide
gcccugggggaaguucacau

SEQ ID NO: 35701 - RNA, 20 nt, Artificial Sequence
  RPE65 RNA guide
gcucacuuucuuggggugac

SEQ ID NO: 35702 - RNA, 20 nt, Artificial Sequence
  RPE65 RNA guide
gcuccacaugggcuguacgg

SEQ ID NO: 35703 - RNA, 20 nt, Artificial Sequence
  RPE65 RNA guide
gcuccugucuauacucuucc

SEQ ID NO: 35704 - RNA, 20 nt, Artificial Sequence
  RPE65 RNA guide
gcucuggccaacuaggauuc

SEQ ID NO: 35705 - RNA, 20 nt, Artificial Sequence
  RPE65 RNA guide
gcugcauggugugauauaga

SEQ ID NO: 35706 - RNA, 20 nt, Artificial Sequence
  RPE65 RNA guide
gcuggguuagaauccuaguu

SEQ ID NO: 35707 - RNA, 20 nt, Artificial Sequence
  RPE65 RNA guide
gcuguacggauugcuccugu

SEQ ID NO: 35708 - RNA, 20 nt, Artificial Sequence
  RPE65 RNA guide
gcuuagaauggccauucuau

SEQ ID NO: 35709 - RNA, 20 nt, Artificial Sequence
  RPE65 RNA guide
gcuuggccacauaugccaau

SEQ ID NO: 35710 - RNA, 20 nt, Artificial Sequence
  RPE65 RNA guide
gcuuggucaccccaagaaag

SEQ ID NO: 35711 - RNA, 20 nt, Artificial Sequence
  RPE65 RNA guide
ggaaaauuccggacauggug

SEQ ID NO: 35712 - RNA, 20 nt, Artificial Sequence
  RPE65 RNA guide
ggaaauugagguucagagga

SEQ ID NO: 35713 - RNA, 20 nt, Artificial Sequence
  RPE65 RNA guide
ggaagaguauagacaggagc

SEQ ID NO: 35714 - RNA, 20 nt, Artificial Sequence
  RPE65 RNA guide
ggaaguucacauaggacccc

SEQ ID NO: 35715 - RNA, 20 nt, Artificial Sequence
  RPE65 RNA guide
ggaauuuucccaguaaguuu

SEQ ID NO: 35716 - RNA, 20 nt, Artificial Sequence
  RPE65 RNA guide
ggacaacaugaacuuucuau

SEQ ID NO: 35717 - RNA, 20 nt, Artificial Sequence
  RPE65 RNA guide
ggacacauagaauggccauu

SEQ ID NO: 35718 - RNA, 20 nt, Artificial Sequence
  RPE65 RNA guide
ggacauggugugcugaauua

SEQ ID NO: 35719 - RNA, 20 nt, Artificial Sequence
  RPE65 RNA guide
ggacauugaaacauagggaa

SEQ ID NO: 35720 - RNA, 20 nt, Artificial Sequence
  RPE65 RNA guide
ggacauugugucugcccugc

SEQ ID NO: 35721 - RNA, 20 nt, Artificial Sequence
  RPE65 RNA guide
ggacccccacccccaucacc

SEQ ID NO: 35722 - RNA, 20 nt, Artificial Sequence
  RPE65 RNA guide
ggagcaauccguacagccca

SEQ ID NO: 35723 - RNA, 20 nt, Artificial Sequence
  RPE65 RNA guide
ggagcuuagaauggccauuc

SEQ ID NO: 35724 - RNA, 20 nt, Artificial Sequence
  RPE65 RNA guide
ggaguuaagugauuggcaua

SEQ ID NO: 35725 - RNA, 20 nt, Artificial Sequence
  RPE65 RNA guide
ggauucuaacccagcuuggc

SEQ ID NO: 35726 - RNA, 20 nt, Artificial Sequence
  RPE65 RNA guide
ggauugcuccugucuauacu

SEQ ID NO: 35727 - RNA, 20 nt, Artificial Sequence
  RPE65 RNA guide
ggcagacacaaugucccuug

SEQ ID NO: 35728 - RNA, 20 nt, Artificial Sequence
  RPE65 RNA guide
ggcauauguggccaagcugg

SEQ ID NO: 35729 - RNA, 20 nt, Artificial Sequence
  RPE65 RNA guide
ggccaacuaggauucuaacc

SEQ ID NO: 35730 - RNA, 20 nt, Artificial Sequence
  RPE65 RNA guide
ggccaagcuggguuagaauc

SEQ ID NO: 35731 - RNA, 20 nt, Artificial Sequence
  RPE65 RNA guide
ggccacauaugccaaucacu

SEQ ID NO: 35732 - RNA, 20 nt, Artificial Sequence
  RPE65 RNA guide
ggccagagcaggacaacaug

SEQ ID NO: 35733 - RNA, 20 nt, Artificial Sequence
  RPE65 RNA guide
ggccauucuaagcuccacau

SEQ ID NO: 35734 - RNA, 20 nt, Artificial Sequence
  RPE65 RNA guide
ggccauucuauguguccuca

SEQ ID NO: 35735 - RNA, 20 nt, Artificial Sequence
  RPE65 RNA guide
ggcugcauggugugauauag

SEQ ID NO: 35736 - RNA, 20 nt, Artificial Sequence
  RPE65 RNA guide
ggcuguacggauugcuccug

SEQ ID NO: 35737 - RNA, 20 nt, Artificial Sequence
  RPE65 RNA guide
gggaaaauuccggacauggu

SEQ ID NO: 35738 - RNA, 20 nt, Artificial Sequence
  RPE65 RNA guide
gggaagaguauagacaggag

SEQ ID NO: 35739 - RNA, 20 nt, Artificial Sequence
  RPE65 RNA guide
gggaaguucacauaggaccc

SEQ ID NO: 35740 - RNA, 20 nt, Artificial Sequence
  RPE65 RNA guide
gggacauugugucugcccug

SEQ ID NO: 35741 - RNA, 20 nt, Artificial Sequence
  RPE65 RNA guide
gggcagacacaaugucccuu

SEQ ID NO: 35742 - RNA, 20 nt, Artificial Sequence
  RPE65 RNA guide
gggcugcauggugugauaua

SEQ ID NO: 35743 - RNA, 20 nt, Artificial Sequence
  RPE65 RNA guide
gggcuguacggauugcuccu

SEQ ID NO: 35744 - RNA, 20 nt, Artificial Sequence
  RPE65 RNA guide
ggggaaguucacauaggacc

SEQ ID NO: 35745 - RNA, 20 nt, Artificial Sequence
  RPE65 RNA guide
gggggaaguucacauaggac

SEQ ID NO: 35746 - RNA, 20 nt, Artificial Sequence
  RPE65 RNA guide
ggggguccuaugugaacuuc

SEQ ID NO: 35747 - RNA, 20 nt, Artificial Sequence
  RPE65 RNA guide
ggggguggggguccuaugug

SEQ ID NO: 35748 - RNA, 20 nt, Artificial Sequence
  RPE65 RNA guide
gggguccuaugugaacuucc

SEQ ID NO: 35749 - RNA, 20 nt, Artificial Sequence
  RPE65 RNA guide
ggggugaccaagcagggcag

SEQ ID NO: 35750 - RNA, 20 nt, Artificial Sequence
  RPE65 RNA guide
gggguggggguccuauguga

SEQ ID NO: 35751 - RNA, 20 nt, Artificial Sequence
  RPE65 RNA guide
ggguccuaugugaacuuccc

SEQ ID NO: 35752 - RNA, 20 nt, Artificial Sequence
  RPE65 RNA guide
gggugaccaagcagggcaga

SEQ ID NO: 35753 - RNA, 20 nt, Artificial Sequence
  RPE65 RNA guide
ggguggggguccuaugugaa

SEQ ID NO: 35754 - RNA, 20 nt, Artificial Sequence
  RPE65 RNA guide
ggguuagaauccuaguuggc

SEQ ID NO: 35755 - RNA, 20 nt, Artificial Sequence
  RPE65 RNA guide
ggguuuuauuagcucacuuu

SEQ ID NO: 35756 - RNA, 20 nt, Artificial Sequence
  RPE65 RNA guide
ggucaccccaagaaagugag

SEQ ID NO: 35757 - RNA, 20 nt, Artificial Sequence
  RPE65 RNA guide
gguccuaugugaacuucccc

SEQ ID NO: 35758 - RNA, 20 nt, Artificial Sequence
  RPE65 RNA guide
ggugaccaagcagggcagac

SEQ ID NO: 35759 - RNA, 20 nt, Artificial Sequence
  RPE65 RNA guide
ggugaugggggugggggucc

SEQ ID NO: 35760 - RNA, 20 nt, Artificial Sequence
  RPE65 RNA guide
gguggggguccuaugugaac

SEQ ID NO: 35761 - RNA, 20 nt, Artificial Sequence
  RPE65 RNA guide
ggugugauauagaaaguuca

SEQ ID NO: 35762 - RNA, 20 nt, Artificial Sequence
  RPE65 RNA guide
gguuagaauccuaguuggcc

SEQ ID NO: 35763 - RNA, 20 nt, Artificial Sequence
  RPE65 RNA guide
gguuauaggugaugggggug

SEQ ID NO: 35764 - RNA, 20 nt, Artificial Sequence
  RPE65 RNA guide
gguucagaggaguuaaguga

SEQ ID NO: 35765 - RNA, 20 nt, Artificial Sequence
  RPE65 RNA guide
gguugauagguuauagguga

SEQ ID NO: 35766 - RNA, 20 nt, Artificial Sequence
  RPE65 RNA guide
gguuuuauuagcucacuuuc

SEQ ID NO: 35767 - RNA, 20 nt, Artificial Sequence
  RPE65 RNA guide
guaaacucaagggacauugu

SEQ ID NO: 35768 - RNA, 20 nt, Artificial Sequence
  RPE65 RNA guide
guacagcccauguggagcuu

SEQ ID NO: 35769 - RNA, 20 nt, Artificial Sequence
  RPE65 RNA guide
guacggauugcuccugucua

SEQ ID NO: 35770 - RNA, 20 nt, Artificial Sequence
  RPE65 RNA guide
guauagacaggagcaauccg

SEQ ID NO: 35771 - RNA, 20 nt, Artificial Sequence
  RPE65 RNA guide
gucacaaucauaaaugcaca

SEQ ID NO: 35772 - RNA, 20 nt, Artificial Sequence
  RPE65 RNA guide
gucaccccaagaaagugagc

SEQ ID NO: 35773 - RNA, 20 nt, Artificial Sequence
  RPE65 RNA guide
gucccuugaguuuacguuuu

SEQ ID NO: 35774 - RNA, 20 nt, Artificial Sequence
  RPE65 RNA guide
guccggaauuuucccaguaa

SEQ ID NO: 35775 - RNA, 20 nt, Artificial Sequence
  RPE65 RNA guide
guccuaugugaacuuccccc

SEQ ID NO: 35776 - RNA, 20 nt, Artificial Sequence
  RPE65 RNA guide
guccucaucaagucacaauc

SEQ ID NO: 35777 - RNA, 20 nt, Artificial Sequence
  RPE65 RNA guide
guccugcucuggccaacuag

SEQ ID NO: 35778 - RNA, 20 nt, Artificial Sequence
  RPE65 RNA guide
gucuauacucuucccuaugu

SEQ ID NO: 35779 - RNA, 20 nt, Artificial Sequence
  RPE65 RNA guide
gucugcccugcuuggucacc

SEQ ID NO: 35780 - RNA, 20 nt, Artificial Sequence
  RPE65 RNA guide
gugaacuucccccagggcug

SEQ ID NO: 35781 - RNA, 20 nt, Artificial Sequence
  RPE65 RNA guide
gugaccaagcagggcagaca

SEQ ID NO: 35782 - RNA, 20 nt, Artificial Sequence
  RPE65 RNA guide
gugacuugaugaggacacau

SEQ ID NO: 35783 - RNA, 20 nt, Artificial Sequence
  RPE65 RNA guide
gugagcuaauaaaacccuuu

SEQ ID NO: 35784 - RNA, 20 nt, Artificial Sequence
  RPE65 RNA guide
gugauauagaaaguucaugu

SEQ ID NO: 35785 - RNA, 20 nt, Artificial Sequence
  RPE65 RNA guide
gugauggggguggggguccu

SEQ ID NO: 35786 - RNA, 20 nt, Artificial Sequence
  RPE65 RNA guide
gugauuggcauauguggcca

SEQ ID NO: 35787 - RNA, 20 nt, Artificial Sequence
  RPE65 RNA guide
gugcauuuaugauugugacu

SEQ ID NO: 35788 - RNA, 20 nt, Artificial Sequence
  RPE65 RNA guide
guggagcuuagaauggccau

SEQ ID NO: 35789 - RNA, 20 nt, Artificial Sequence
  RPE65 RNA guide
guggccaagcuggguuagaa

SEQ ID NO: 35790 - RNA, 20 nt, Artificial Sequence
  RPE65 RNA guide
guggggguccuaugugaacu

SEQ ID NO: 35791 - RNA, 20 nt, Artificial Sequence
  RPE65 RNA guide
guguccucaucaagucacaa

SEQ ID NO: 35792 - RNA, 20 nt, Artificial Sequence
  RPE65 RNA guide
gugucugcccugcuugguca

SEQ ID NO: 35793 - RNA, 20 nt, Artificial Sequence
  RPE65 RNA guide
gugugauauagaaaguucau

SEQ ID NO: 35794 - RNA, 20 nt, Artificial Sequence
  RPE65 RNA guide
guuaagugauuggcauaugu

SEQ ID NO: 35795 - RNA, 20 nt, Artificial Sequence
  RPE65 RNA guide
guuagaauccuaguuggcca

SEQ ID NO: 35796 - RNA, 20 nt, Artificial Sequence
  RPE65 RNA guide
guuauaggugaugggggugg

SEQ ID NO: 35797 - RNA, 20 nt, Artificial Sequence
  RPE65 RNA guide
guucacauaggacccccacc

SEQ ID NO: 35798 - RNA, 20 nt, Artificial Sequence
  RPE65 RNA guide
guucagaggaguuaagugau

SEQ ID NO: 35799 - RNA, 20 nt, Artificial Sequence
  RPE65 RNA guide
guucauguuguccugcucug

SEQ ID NO: 35800 - RNA, 20 nt, Artificial Sequence
  RPE65 RNA guide
guugauagguuauaggugau

SEQ ID NO: 35801 - RNA, 20 nt, Artificial Sequence
  RPE65 RNA guide
guuggccagagcaggacaac

SEQ ID NO: 35802 - RNA, 20 nt, Artificial Sequence
  RPE65 RNA guide
guuguccugcucuggccaac

SEQ ID NO: 35803 - RNA, 20 nt, Artificial Sequence
  RPE65 RNA guide
guugugcauuuaugauugug

SEQ ID NO: 35804 - RNA, 20 nt, Artificial Sequence
  RPE65 RNA guide
guuuagguugauagguuaua

SEQ ID NO: 35805 - RNA, 20 nt, Artificial Sequence
  RPE65 RNA guide
guuuuauuagcucacuuucu

SEQ ID NO: 35806 - RNA, 20 nt, Artificial Sequence
  RPE65 RNA guide
uaaaaacguaaacucaaggg

SEQ ID NO: 35807 - RNA, 20 nt, Artificial Sequence
  RPE65 RNA guide
uaaaaguaacagagggagau

SEQ ID NO: 35808 - RNA, 20 nt, Artificial Sequence
  RPE65 RNA guide
uaaaccucacagaugaggaa

SEQ ID NO: 35809 - RNA, 20 nt, Artificial Sequence
  RPE65 RNA guide
uaaacucaagggacauugug

SEQ ID NO: 35810 - RNA, 20 nt, Artificial Sequence
  RPE65 RNA guide
uaaacuuacugggaaaauuc

SEQ ID NO: 35811 - RNA, 20 nt, Artificial Sequence
  RPE65 RNA guide
uaacccagcuuggccacaua

SEQ ID NO: 35812 - RNA, 20 nt, Artificial Sequence
  RPE65 RNA guide
uaaccuaucaaccuaaacuu

SEQ ID NO: 35813 - RNA, 20 nt, Artificial Sequence
  RPE65 RNA guide
uaacuccucugaaccucaau

SEQ ID NO: 35814 - RNA, 20 nt, Artificial Sequence
  RPE65 RNA guide
uaagcuccacaugggcugua

SEQ ID NO: 35815 - RNA, 20 nt, Artificial Sequence
  RPE65 RNA guide
uaagugauuggcauaugugg

SEQ ID NO: 35816 - RNA, 20 nt, Artificial Sequence
  RPE65 RNA guide
uaauucagcacaccaugucc

SEQ ID NO: 35817 - RNA, 20 nt, Artificial Sequence
  RPE65 RNA guide
uacagcccauguggagcuua

SEQ ID NO: 35818 - RNA, 20 nt, Artificial Sequence
  RPE65 RNA guide
uacggauugcuccugucuau

SEQ ID NO: 35819 - RNA, 20 nt, Artificial Sequence
  RPE65 RNA guide
uacucuucccuauguuucaa

SEQ ID NO: 35820 - RNA, 20 nt, Artificial Sequence
  RPE65 RNA guide
uacugggaaaauuccggaca

SEQ ID NO: 35821 - RNA, 20 nt, Artificial Sequence
  RPE65 RNA guide
uagaaaguucauguuguccu

SEQ ID NO: 35822 - RNA, 20 nt, Artificial Sequence
  RPE65 RNA guide
uagaauccuaguuggccaga

SEQ ID NO: 35823 - RNA, 20 nt, Artificial Sequence
  RPE65 RNA guide
uagaauggccauucuaagcu

SEQ ID NO: 35824 - RNA, 20 nt, Artificial Sequence
  RPE65 RNA guide
uagaauggccauucuaugug

SEQ ID NO: 35825 - RNA, 20 nt, Artificial Sequence
  RPE65 RNA guide
uagacaggagcaauccguac

SEQ ID NO: 35826 - RNA, 20 nt, Artificial Sequence
  RPE65 RNA guide
uagcucacuuucuuggggug

SEQ ID NO: 35827 - RNA, 20 nt, Artificial Sequence
  RPE65 RNA guide
uaggacccccacccccauca

SEQ ID NO: 35828 - RNA, 20 nt, Artificial Sequence
  RPE65 RNA guide
uaggauucuaacccagcuug

SEQ ID NO: 35829 - RNA, 20 nt, Artificial Sequence
  RPE65 RNA guide
uagggaagaguauagacagg

SEQ ID NO: 35830 - RNA, 20 nt, Artificial Sequence
  RPE65 RNA guide
uaggugaugggggugggggu

SEQ ID NO: 35831 - RNA, 20 nt, Artificial Sequence
  RPE65 RNA guide
uagguuauaggugauggggg

SEQ ID NO: 35832 - RNA, 20 nt, Artificial Sequence
  RPE65 RNA guide
uagguugauagguuauaggu

SEQ ID NO: 35833 - RNA, 20 nt, Artificial Sequence
  RPE65 RNA guide
uaguuggccagagcaggaca

SEQ ID NO: 35834 - RNA, 20 nt, Artificial Sequence
  RPE65 RNA guide
uauaauucagcacaccaugu

SEQ ID NO: 35835 - RNA, 20 nt, Artificial Sequence
  RPE65 RNA guide
uauacucuucccuauguuuc

SEQ ID NO: 35836 - RNA, 20 nt, Artificial Sequence
  RPE65 RNA guide
uauagaaaguucauguuguc

SEQ ID NO: 35837 - RNA, 20 nt, Artificial Sequence
  RPE65 RNA guide
uauagacaggagcaauccgu

SEQ ID NO: 35838 - RNA, 20 nt, Artificial Sequence
  RPE65 RNA guide
uauaggugaugggggugggg

SEQ ID NO: 35839 - RNA, 20 nt, Artificial Sequence
  RPE65 RNA guide
uauaucacaccaugcagccc

SEQ ID NO: 35840 - RNA, 20 nt, Artificial Sequence
  RPE65 RNA guide
uaucaaccuaaacuuacugg

SEQ ID NO: 35841 - RNA, 20 nt, Artificial Sequence
  RPE65 RNA guide
uaucacaccaugcagcccug

SEQ ID NO: 35842 - RNA, 20 nt, Artificial Sequence
  RPE65 RNA guide
uaucuuuuaaaccucacaga

SEQ ID NO: 35843 - RNA, 20 nt, Artificial Sequence
  RPE65 RNA guide
uaugauugugacuugaugag

SEQ ID NO: 35844 - RNA, 20 nt, Artificial Sequence
  RPE65 RNA guide
uaugccaaucacuuaacucc

SEQ ID NO: 35845 - RNA, 20 nt, Artificial Sequence
  RPE65 RNA guide
uaugugaacuucccccaggg

SEQ ID NO: 35846 - RNA, 20 nt, Artificial Sequence
  RPE65 RNA guide
uauguggccaagcuggguua

SEQ ID NO: 35847 - RNA, 20 nt, Artificial Sequence
  RPE65 RNA guide
uauguguccucaucaaguca

SEQ ID NO: 35848 - RNA, 20 nt, Artificial Sequence
  RPE65 RNA guide
uauuagcucacuuucuuggg

SEQ ID NO: 35849 - RNA, 20 nt, Artificial Sequence
  RPE65 RNA guide
ucaaccuaaacuuacuggga

SEQ ID NO: 35850 - RNA, 20 nt, Artificial Sequence
  RPE65 RNA guide
ucaagggacauugugucugc

SEQ ID NO: 35851 - RNA, 20 nt, Artificial Sequence
  RPE65 RNA guide
ucaagucacaaucauaaaug

SEQ ID NO: 35852 - RNA, 20 nt, Artificial Sequence
  RPE65 RNA guide
ucaaucucccucuguuacuu

SEQ ID NO: 35853 - RNA, 20 nt, Artificial Sequence
  RPE65 RNA guide
ucaauuuccucaucugugag

SEQ ID NO: 35854 - RNA, 20 nt, Artificial Sequence
  RPE65 RNA guide
ucacaaucauaaaugcacaa

SEQ ID NO: 35855 - RNA, 20 nt, Artificial Sequence
  RPE65 RNA guide
ucacaccaugcagcccuggg

SEQ ID NO: 35856 - RNA, 20 nt, Artificial Sequence
  RPE65 RNA guide
ucacauaggacccccacccc

SEQ ID NO: 35857 - RNA, 20 nt, Artificial Sequence
  RPE65 RNA guide
ucaccccaagaaagugagcu

SEQ ID NO: 35858 - RNA, 20 nt, Artificial Sequence
  RPE65 RNA guide
ucaccuauaaccuaucaacc

SEQ ID NO: 35859 - RNA, 20 nt, Artificial Sequence
  RPE65 RNA guide
ucacuuaacuccucugaacc

SEQ ID NO: 35860 - RNA, 20 nt, Artificial Sequence
  RPE65 RNA guide
ucacuuucuuggggugacca

SEQ ID NO: 35861 - RNA, 20 nt, Artificial Sequence
  RPE65 RNA guide
ucagaggaguuaagugauug

SEQ ID NO: 35862 - RNA, 20 nt, Artificial Sequence
  RPE65 RNA guide
ucagcacaccauguccggaa

SEQ ID NO: 35863 - RNA, 20 nt, Artificial Sequence
  RPE65 RNA guide
ucaucaagucacaaucauaa

SEQ ID NO: 35864 - RNA, 20 nt, Artificial Sequence
  RPE65 RNA guide
ucauguuguccugcucuggc

SEQ ID NO: 35865 - RNA, 20 nt, Artificial Sequence
  RPE65 RNA guide
ucauguugugcauuuaugau

SEQ ID NO: 35866 - RNA, 20 nt, Artificial Sequence
  RPE65 RNA guide
uccacaugggcuguacggau

SEQ ID NO: 35867 - RNA, 20 nt, Artificial Sequence
  RPE65 RNA guide
ucccaguaaguuuagguuga

SEQ ID NO: 35868 - RNA, 20 nt, Artificial Sequence
  RPE65 RNA guide
ucccccagggcugcauggug

SEQ ID NO: 35869 - RNA, 20 nt, Artificial Sequence
  RPE65 RNA guide
ucccuauguuucaauguccu

SEQ ID NO: 35870 - RNA, 20 nt, Artificial Sequence
  RPE65 RNA guide
ucccuugaguuuacguuuuu

SEQ ID NO: 35871 - RNA, 20 nt, Artificial Sequence
  RPE65 RNA guide
uccggaauuuucccaguaag

SEQ ID NO: 35872 - RNA, 20 nt, Artificial Sequence
  RPE65 RNA guide
uccggacauggugugcugaa

SEQ ID NO: 35873 - RNA, 20 nt, Artificial Sequence
  RPE65 RNA guide
uccguacagcccauguggag

SEQ ID NO: 35874 - RNA, 20 nt, Artificial Sequence
  RPE65 RNA guide
uccuaguuggccagagcagg

SEQ ID NO: 35875 - RNA, 20 nt, Artificial Sequence
  RPE65 RNA guide
uccuaugugaacuuccccca

SEQ ID NO: 35876 - RNA, 20 nt, Artificial Sequence
  RPE65 RNA guide
uccucaucaagucacaauca

SEQ ID NO: 35877 - RNA, 20 nt, Artificial Sequence
  RPE65 RNA guide
uccucaucugugagguuuaa

SEQ ID NO: 35878 - RNA, 20 nt, Artificial Sequence
  RPE65 RNA guide
uccugcucuggccaacuagg

SEQ ID NO: 35879 - RNA, 20 nt, Artificial Sequence
  RPE65 RNA guide
uccugucuauacucuucccu

SEQ ID NO: 35880 - RNA, 20 nt, Artificial Sequence
  RPE65 RNA guide
ucuaacccagcuuggccaca

SEQ ID NO: 35881 - RNA, 20 nt, Artificial Sequence
  RPE65 RNA guide
ucuaagcuccacaugggcug

SEQ ID NO: 35882 - RNA, 20 nt, Artificial Sequence
  RPE65 RNA guide
ucuauacucuucccuauguu

SEQ ID NO: 35883 - RNA, 20 nt, Artificial Sequence
  RPE65 RNA guide
ucuauaucacaccaugcagc

SEQ ID NO: 35884 - RNA, 20 nt, Artificial Sequence
  RPE65 RNA guide
ucuauguguccucaucaagu

SEQ ID NO: 35885 - RNA, 20 nt, Artificial Sequence
  RPE65 RNA guide
ucucaaucucccucuguuac

SEQ ID NO: 35886 - RNA, 20 nt, Artificial Sequence
  RPE65 RNA guide
ucucccucuguuacuuuuau

SEQ ID NO: 35887 - RNA, 20 nt, Artificial Sequence
  RPE65 RNA guide
ucugcccugcuuggucaccc

SEQ ID NO: 35888 - RNA, 20 nt, Artificial Sequence
  RPE65 RNA guide
ucuggccaacuaggauucua

SEQ ID NO: 35889 - RNA, 20 nt, Artificial Sequence
  RPE65 RNA guide
ucuucccuauguuucaaugu

SEQ ID NO: 35890 - RNA, 20 nt, Artificial Sequence
  RPE65 RNA guide
ucuuggggugaccaagcagg

SEQ ID NO: 35891 - RNA, 20 nt, Artificial Sequence
  RPE65 RNA guide
ucuuuuaaaccucacagaug

SEQ ID NO: 35892 - RNA, 20 nt, Artificial Sequence
  RPE65 RNA guide
ugaaacauagggaagaguau

SEQ ID NO: 35893 - RNA, 20 nt, Artificial Sequence
  RPE65 RNA guide
ugaacuucccccagggcugc

SEQ ID NO: 35894 - RNA, 20 nt, Artificial Sequence
  RPE65 RNA guide
ugaacuuucuauaucacacc

SEQ ID NO: 35895 - RNA, 20 nt, Artificial Sequence
  RPE65 RNA guide
ugaaggacauugaaacauag

SEQ ID NO: 35896 - RNA, 20 nt, Artificial Sequence
  RPE65 RNA guide
ugaccaagcagggcagacac

SEQ ID NO: 35897 - RNA, 20 nt, Artificial Sequence
  RPE65 RNA guide
ugacuugaugaggacacaua

SEQ ID NO: 35898 - RNA, 20 nt, Artificial Sequence
  RPE65 RNA guide
ugaggaaauugagguucaga

SEQ ID NO: 35899 - RNA, 20 nt, Artificial Sequence
  RPE65 RNA guide
ugaggacacauagaauggcc

SEQ ID NO: 35900 - RNA, 20 nt, Artificial Sequence
  RPE65 RNA guide
ugagguucagaggaguuaag

SEQ ID NO: 35901 - RNA, 20 nt, Artificial Sequence
  RPE65 RNA guide
ugauagguuauaggugaugg

SEQ ID NO: 35902 - RNA, 20 nt, Artificial Sequence
  RPE65 RNA guide
ugauauagaaaguucauguu

SEQ ID NO: 35903 - RNA, 20 nt, Artificial Sequence
  RPE65 RNA guide
ugaugaggacacauagaaug

SEQ ID NO: 35904 - RNA, 20 nt, Artificial Sequence
  RPE65 RNA guide
ugauggggguggggguccua

SEQ ID NO: 35905 - RNA, 20 nt, Artificial Sequence
  RPE65 RNA guide
ugauuggcauauguggccaa

SEQ ID NO: 35906 - RNA, 20 nt, Artificial Sequence
  RPE65 RNA guide
ugauugugacuugaugagga

SEQ ID NO: 35907 - RNA, 20 nt, Artificial Sequence
  RPE65 RNA guide
ugcacaacaugaagaauaaa

SEQ ID NO: 35908 - RNA, 20 nt, Artificial Sequence
  RPE65 RNA guide
ugcagcccugggggaaguuc

SEQ ID NO: 35909 - RNA, 20 nt, Artificial Sequence
  RPE65 RNA guide
ugcauggugugauauagaaa

SEQ ID NO: 35910 - RNA, 20 nt, Artificial Sequence
  RPE65 RNA guide
ugcauuuaugauugugacuu

SEQ ID NO: 35911 - RNA, 20 nt, Artificial Sequence
  RPE65 RNA guide
ugccaaucacuuaacuccuc

SEQ ID NO: 35912 - RNA, 20 nt, Artificial Sequence
  RPE65 RNA guide
ugcccugcuuggucacccca

SEQ ID NO: 35913 - RNA, 20 nt, Artificial Sequence
  RPE65 RNA guide
ugcuccugucuauacucuuc

SEQ ID NO: 35914 - RNA, 20 nt, Artificial Sequence
  RPE65 RNA guide
ugcucuggccaacuaggauu

SEQ ID NO: 35915 - RNA, 20 nt, Artificial Sequence
  RPE65 RNA guide
ugcuuggucaccccaagaaa

SEQ ID NO: 35916 - RNA, 20 nt, Artificial Sequence
  RPE65 RNA guide
uggagcuuagaauggccauu

SEQ ID NO: 35917 - RNA, 20 nt, Artificial Sequence
  RPE65 RNA guide
uggcauauguggccaagcug

SEQ ID NO: 35918 - RNA, 20 nt, Artificial Sequence
  RPE65 RNA guide
uggccaacuaggauucuaac

SEQ ID NO: 35919 - RNA, 20 nt, Artificial Sequence
  RPE65 RNA guide
uggccaagcuggguuagaau

SEQ ID NO: 35920 - RNA, 20 nt, Artificial Sequence
  RPE65 RNA guide
uggccacauaugccaaucac

SEQ ID NO: 35921 - RNA, 20 nt, Artificial Sequence
  RPE65 RNA guide
uggccagagcaggacaacau

SEQ ID NO: 35922 - RNA, 20 nt, Artificial Sequence
  RPE65 RNA guide
uggccauucuaagcuccaca

SEQ ID NO: 35923 - RNA, 20 nt, Artificial Sequence
  RPE65 RNA guide
uggccauucuauguguccuc

SEQ ID NO: 35924 - RNA, 20 nt, Artificial Sequence
  RPE65 RNA guide
ugggaaaauuccggacaugg

SEQ ID NO: 35925 - RNA, 20 nt, Artificial Sequence
  RPE65 RNA guide
ugggcuguacggauugcucc

SEQ ID NO: 35926 - RNA, 20 nt, Artificial Sequence
  RPE65 RNA guide
ugggggaaguucacauagga

SEQ ID NO: 35927 - RNA, 20 nt, Artificial Sequence
  RPE65 RNA guide
uggggguccuaugugaacuu

SEQ ID NO: 35928 - RNA, 20 nt, Artificial Sequence
  RPE65 RNA guide
uggggguggggguccuaugu

SEQ ID NO: 35929 - RNA, 20 nt, Artificial Sequence
  RPE65 RNA guide
uggggugaccaagcagggca

SEQ ID NO: 35930 - RNA, 20 nt, Artificial Sequence
  RPE65 RNA guide
uggguuagaauccuaguugg

SEQ ID NO: 35931 - RNA, 20 nt, Artificial Sequence
  RPE65 RNA guide
uggucaccccaagaaaguga

SEQ ID NO: 35932 - RNA, 20 nt, Artificial Sequence
  RPE65 RNA guide
uggugugauauagaaaguuc

SEQ ID NO: 35933 - RNA, 20 nt, Artificial Sequence
  RPE65 RNA guide
uguacggauugcuccugucu

SEQ ID NO: 35934 - RNA, 20 nt, Artificial Sequence
  RPE65 RNA guide
ugucccuugaguuuacguuu

SEQ ID NO: 35935 - RNA, 20 nt, Artificial Sequence
  RPE65 RNA guide
uguccggaauuuucccagua

SEQ ID NO: 35936 - RNA, 20 nt, Artificial Sequence
  RPE65 RNA guide
uguccucaucaagucacaau

SEQ ID NO: 35937 - RNA, 20 nt, Artificial Sequence
  RPE65 RNA guide
uguccugcucuggccaacua

SEQ ID NO: 35938 - RNA, 20 nt, Artificial Sequence
  RPE65 RNA guide
ugucuauacucuucccuaug

SEQ ID NO: 35939 - RNA, 20 nt, Artificial Sequence
  RPE65 RNA guide
ugucugcccugcuuggucac

SEQ ID NO: 35940 - RNA, 20 nt, Artificial Sequence
  RPE65 RNA guide
ugugaacuucccccagggcu

SEQ ID NO: 35941 - RNA, 20 nt, Artificial Sequence
  RPE65 RNA guide
ugugacuugaugaggacaca

SEQ ID NO: 35942 - RNA, 20 nt, Artificial Sequence
  RPE65 RNA guide
ugugcauuuaugauugugac

SEQ ID NO: 35943 - RNA, 20 nt, Artificial Sequence
  RPE65 RNA guide
uguggagcuuagaauggcca

SEQ ID NO: 35944 - RNA, 20 nt, Artificial Sequence
  RPE65 RNA guide
uguggccaagcuggguuaga

SEQ ID NO: 35945 - RNA, 20 nt, Artificial Sequence
  RPE65 RNA guide
uguguccucaucaagucaca

SEQ ID NO: 35946 - RNA, 20 nt, Artificial Sequence
  RPE65 RNA guide
ugugucugcccugcuugguc

SEQ ID NO: 35947 - RNA, 20 nt, Artificial Sequence
  RPE65 RNA guide
uguuguccugcucuggccaa

SEQ ID NO: 35948 - RNA, 20 nt, Artificial Sequence
  RPE65 RNA guide
uguugugcauuuaugauugu

SEQ ID NO: 35949 - RNA, 20 nt, Artificial Sequence
  RPE65 RNA guide
uuaaaccucacagaugagga

SEQ ID NO: 35950 - RNA, 20 nt, Artificial Sequence
  RPE65 RNA guide
uuaacuccucugaaccucaa

SEQ ID NO: 35951 - RNA, 20 nt, Artificial Sequence
  RPE65 RNA guide
uuaagugauuggcauaugug

SEQ ID NO: 35952 - RNA, 20 nt, Artificial Sequence
  RPE65 RNA guide
uuacugggaaaauuccggac

SEQ ID NO: 35953 - RNA, 20 nt, Artificial Sequence
  RPE65 RNA guide
uuagaauccuaguuggccag

SEQ ID NO: 35954 - RNA, 20 nt, Artificial Sequence
  RPE65 RNA guide
uuagaauggccauucuaugu

SEQ ID NO: 35955 - RNA, 20 nt, Artificial Sequence
  RPE65 RNA guide
uuagcucacuuucuuggggu

SEQ ID NO: 35956 - RNA, 20 nt, Artificial Sequence
  RPE65 RNA guide
uuagguugauagguuauagg

SEQ ID NO: 35957 - RNA, 20 nt, Artificial Sequence
  RPE65 RNA guide
uuauaggugauggggguggg

SEQ ID NO: 35958 - RNA, 20 nt, Artificial Sequence
  RPE65 RNA guide
uuaugauugugacuugauga

SEQ ID NO: 35959 - RNA, 20 nt, Artificial Sequence
  RPE65 RNA guide
uuauuagcucacuuucuugg

SEQ ID NO: 35960 - RNA, 20 nt, Artificial Sequence
  RPE65 RNA guide
uucacauaggacccccaccc

SEQ ID NO: 35961 - RNA, 20 nt, Artificial Sequence
  RPE65 RNA guide
uucagaggaguuaagugauu

SEQ ID NO: 35962 - RNA, 20 nt, Artificial Sequence
  RPE65 RNA guide
uucagcacaccauguccgga

SEQ ID NO: 35963 - RNA, 20 nt, Artificial Sequence
  RPE65 RNA guide
uucauguuguccugcucugg

SEQ ID NO: 35964 - RNA, 20 nt, Artificial Sequence
  RPE65 RNA guide
uucccaguaaguuuagguug

SEQ ID NO: 35965 - RNA, 20 nt, Artificial Sequence
  RPE65 RNA guide
uucccccagggcugcauggu

SEQ ID NO: 35966 - RNA, 20 nt, Artificial Sequence
  RPE65 RNA guide
uucccuauguuucaaugucc

SEQ ID NO: 35967 - RNA, 20 nt, Artificial Sequence
  RPE65 RNA guide
uuccggacauggugugcuga

SEQ ID NO: 35968 - RNA, 20 nt, Artificial Sequence
  RPE65 RNA guide
uuccucaucugugagguuua

SEQ ID NO: 35969 - RNA, 20 nt, Artificial Sequence
  RPE65 RNA guide
uucuaacccagcuuggccac

SEQ ID NO: 35970 - RNA, 20 nt, Artificial Sequence
  RPE65 RNA guide
uucuaagcuccacaugggcu

SEQ ID NO: 35971 - RNA, 20 nt, Artificial Sequence
  RPE65 RNA guide
uucuauaucacaccaugcag

SEQ ID NO: 35972 - RNA, 20 nt, Artificial Sequence
  RPE65 RNA guide
uucuauguguccucaucaag

SEQ ID NO: 35973 - RNA, 20 nt, Artificial Sequence
  RPE65 RNA guide
uucucaaucucccucuguua

SEQ ID NO: 35974 - RNA, 20 nt, Artificial Sequence
  RPE65 RNA guide
uucuuggggugaccaagcag

SEQ ID NO: 35975 - RNA, 20 nt, Artificial Sequence
  RPE65 RNA guide
uugaaacauagggaagagua

SEQ ID NO: 35976 - RNA, 20 nt, Artificial Sequence
  RPE65 RNA guide
uugagguucagaggaguuaa

SEQ ID NO: 35977 - RNA, 20 nt, Artificial Sequence
  RPE65 RNA guide
uugauagguuauaggugaug

SEQ ID NO: 35978 - RNA, 20 nt, Artificial Sequence
  RPE65 RNA guide
uugaugaggacacauagaau

SEQ ID NO: 35979 - RNA, 20 nt, Artificial Sequence
  RPE65 RNA guide
uugcuccugucuauacucuu

SEQ ID NO: 35980 - RNA, 20 nt, Artificial Sequence
  RPE65 RNA guide
uuggcauauguggccaagcu

SEQ ID NO: 35981 - RNA, 20 nt, Artificial Sequence
  RPE65 RNA guide
uuggccacauaugccaauca

SEQ ID NO: 35982 - RNA, 20 nt, Artificial Sequence
  RPE65 RNA guide
uuggccagagcaggacaaca

SEQ ID NO: 35983 - RNA, 20 nt, Artificial Sequence
  RPE65 RNA guide
uuggggugaccaagcagggc

SEQ ID NO: 35984 - RNA, 20 nt, Artificial Sequence
  RPE65 RNA guide
uuggucaccccaagaaagug

SEQ ID NO: 35985 - RNA, 20 nt, Artificial Sequence
  RPE65 RNA guide
uuguccugcucuggccaacu

SEQ ID NO: 35986 - RNA, 20 nt, Artificial Sequence
  RPE65 RNA guide
uugugacuugaugaggacac

SEQ ID NO: 35987 - RNA, 20 nt, Artificial Sequence
  RPE65 RNA guide
uugugcauuuaugauuguga

SEQ ID NO: 35988 - RNA, 20 nt, Artificial Sequence
  RPE65 RNA guide
uugugucugcccugcuuggu

SEQ ID NO: 35989 - RNA, 20 nt, Artificial Sequence
  RPE65 RNA guide
uuuaaaccucacagaugagg

SEQ ID NO: 35990 - RNA, 20 nt, Artificial Sequence
  RPE65 RNA guide
uuuagguugauagguuauag

SEQ ID NO: 35991 - RNA, 20 nt, Artificial Sequence
  RPE65 RNA guide
uuuaugauugugacuugaug

SEQ ID NO: 35992 - RNA, 20 nt, Artificial Sequence
  RPE65 RNA guide
uuuauuagcucacuuucuug

SEQ ID NO: 35993 - RNA, 20 nt, Artificial Sequence
  RPE65 RNA guide
uuucccaguaaguuuagguu

SEQ ID NO: 35994 - RNA, 20 nt, Artificial Sequence
  RPE65 RNA guide
uuuccucaucugugagguuu

SEQ ID NO: 35995 - RNA, 20 nt, Artificial Sequence
  RPE65 RNA guide
uuucuauaucacaccaugca

SEQ ID NO: 35996 - RNA, 20 nt, Artificial Sequence
  RPE65 RNA guide
uuucuuggggugaccaagca

SEQ ID NO: 35997 - RNA, 20 nt, Artificial Sequence
  RPE65 RNA guide
uuuuaaaccucacagaugag

SEQ ID NO: 35998 - RNA, 20 nt, Artificial Sequence
  RPE65 RNA guide
uuuuauuagcucacuuucuu

SEQ ID NO: 35999 - RNA, 20 nt, Artificial Sequence
  RPE65 RNA guide
uuuucccaguaaguuuaggu

SEQ ID NO: 36000 - RNA, 21 nt, Artificial Sequence
  RPE65 RNA guide
aaaaacauaaaaguaacagag

SEQ ID NO: 36001 - RNA, 21 nt, Artificial Sequence
  RPE65 RNA guide
aaaaacguaaacucaagggac

SEQ ID NO: 36002 - RNA, 21 nt, Artificial Sequence
  RPE65 RNA guide
aaaacauaaaaguaacagagg

SEQ ID NO: 36003 - RNA, 21 nt, Artificial Sequence
  RPE65 RNA guide
aaaacccuuuauucuucaugu

SEQ ID NO: 36004 - RNA, 21 nt, Artificial Sequence
  RPE65 RNA guide
aaaacguaaacucaagggaca

SEQ ID NO: 36005 - RNA, 21 nt, Artificial Sequence
  RPE65 RNA guide
aaaaguaacagagggagauug

SEQ ID NO: 36006 - RNA, 21 nt, Artificial Sequence
  RPE65 RNA guide
aaaauuccggacauggugugc

SEQ ID NO: 36007 - RNA, 21 nt, Artificial Sequence
  RPE65 RNA guide
aaacauaaaaguaacagaggg

SEQ ID NO: 36008 - RNA, 21 nt, Artificial Sequence
  RPE65 RNA guide
aaacauagggaagaguauaga

SEQ ID NO: 36009 - RNA, 21 nt, Artificial Sequence
  RPE65 RNA guide
aaacccuuuauucuucauguu

SEQ ID NO: 36010 - RNA, 21 nt, Artificial Sequence
  RPE65 RNA guide
aaaccucacagaugaggaaau

SEQ ID NO: 36011 - RNA, 21 nt, Artificial Sequence
  RPE65 RNA guide
aaacguaaacucaagggacau

SEQ ID NO: 36012 - RNA, 21 nt, Artificial Sequence
  RPE65 RNA guide
aaacucaagggacauuguguc

SEQ ID NO: 36013 - RNA, 21 nt, Artificial Sequence
  RPE65 RNA guide
aaacuuacugggaaaauuccg

SEQ ID NO: 36014 - RNA, 21 nt, Artificial Sequence
  RPE65 RNA guide
aaagauaaaaacguaaacuca

SEQ ID NO: 36015 - RNA, 21 nt, Artificial Sequence
  RPE65 RNA guide
aaaggguuuuauuagcucacu

SEQ ID NO: 36016 - RNA, 21 nt, Artificial Sequence
  RPE65 RNA guide
aaaguucauguuguccugcuc

SEQ ID NO: 36017 - RNA, 21 nt, Artificial Sequence
  RPE65 RNA guide
aaaugcacaacaugaagaaua

SEQ ID NO: 36018 - RNA, 21 nt, Artificial Sequence
  RPE65 RNA guide
aaauuccggacauggugugcu

SEQ ID NO: 36019 - RNA, 21 nt, Artificial Sequence
  RPE65 RNA guide
aaauugagguucagaggaguu

SEQ ID NO: 36020 - RNA, 21 nt, Artificial Sequence
  RPE65 RNA guide
aacauaaaaguaacagaggga

SEQ ID NO: 36021 - RNA, 21 nt, Artificial Sequence
  RPE65 RNA guide
aacauagggaagaguauagac

SEQ ID NO: 36022 - RNA, 21 nt, Artificial Sequence
  RPE65 RNA guide
aacaugaacuuucuauaucac

SEQ ID NO: 36023 - RNA, 21 nt, Artificial Sequence
  RPE65 RNA guide
aacccagcuuggccacauaug

SEQ ID NO: 36024 - RNA, 21 nt, Artificial Sequence
  RPE65 RNA guide
aacccuuuauucuucauguug

SEQ ID NO: 36025 - RNA, 21 nt, Artificial Sequence
  RPE65 RNA guide
aaccuaaacuuacugggaaaa

SEQ ID NO: 36026 - RNA, 21 nt, Artificial Sequence
  RPE65 RNA guide
aaccuaucaaccuaaacuuac

SEQ ID NO: 36027 - RNA, 21 nt, Artificial Sequence
  RPE65 RNA guide
aaccucaauuuccucaucugu

SEQ ID NO: 36028 - RNA, 21 nt, Artificial Sequence
  RPE65 RNA guide
aaccucacagaugaggaaauu

SEQ ID NO: 36029 - RNA, 21 nt, Artificial Sequence
  RPE65 RNA guide
aacguaaacucaagggacauu

SEQ ID NO: 36030 - RNA, 21 nt, Artificial Sequence
  RPE65 RNA guide
aacuaggauucuaacccagcu

SEQ ID NO: 36031 - RNA, 21 nt, Artificial Sequence
  RPE65 RNA guide
aacucaagggacauugugucu

SEQ ID NO: 36032 - RNA, 21 nt, Artificial Sequence
  RPE65 RNA guide
aacuccucugaaccucaauuu

SEQ ID NO: 36033 - RNA, 21 nt, Artificial Sequence
  RPE65 RNA guide
aacuuacugggaaaauuccgg

SEQ ID NO: 36034 - RNA, 21 nt, Artificial Sequence
  RPE65 RNA guide
aacuucccccagggcugcaug

SEQ ID NO: 36035 - RNA, 21 nt, Artificial Sequence
  RPE65 RNA guide
aacuuucuauaucacaccaug

SEQ ID NO: 36036 - RNA, 21 nt, Artificial Sequence
  RPE65 RNA guide
aagaaagugagcuaauaaaac

SEQ ID NO: 36037 - RNA, 21 nt, Artificial Sequence
  RPE65 RNA guide
aagaguauagacaggagcaau

SEQ ID NO: 36038 - RNA, 21 nt, Artificial Sequence
  RPE65 RNA guide
aagauaaaaacguaaacucaa

SEQ ID NO: 36039 - RNA, 21 nt, Artificial Sequence
  RPE65 RNA guide
aagcagggcagacacaauguc

SEQ ID NO: 36040 - RNA, 21 nt, Artificial Sequence
  RPE65 RNA guide
aagcuccacaugggcuguacg

SEQ ID NO: 36041 - RNA, 21 nt, Artificial Sequence
  RPE65 RNA guide
aagcuggguuagaauccuagu

SEQ ID NO: 36042 - RNA, 21 nt, Artificial Sequence
  RPE65 RNA guide
aaggacauugaaacauaggga

SEQ ID NO: 36043 - RNA, 21 nt, Artificial Sequence
  RPE65 RNA guide
aagggacauugugucugcccu

SEQ ID NO: 36044 - RNA, 21 nt, Artificial Sequence
  RPE65 RNA guide
aaggguuuuauuagcucacuu

SEQ ID NO: 36045 - RNA, 21 nt, Artificial Sequence
  RPE65 RNA guide
aagucacaaucauaaaugcac

SEQ ID NO: 36046 - RNA, 21 nt, Artificial Sequence
  RPE65 RNA guide
aagugauuggcauauguggcc

SEQ ID NO: 36047 - RNA, 21 nt, Artificial Sequence
  RPE65 RNA guide
aaguucacauaggacccccac

SEQ ID NO: 36048 - RNA, 21 nt, Artificial Sequence
  RPE65 RNA guide
aaguucauguuguccugcucu

SEQ ID NO: 36049 - RNA, 21 nt, Artificial Sequence
  RPE65 RNA guide
aaguuuagguugauagguuau

SEQ ID NO: 36050 - RNA, 21 nt, Artificial Sequence
  RPE65 RNA guide
aauauaauucagcacaccaug

SEQ ID NO: 36051 - RNA, 21 nt, Artificial Sequence
  RPE65 RNA guide
aaucacuuaacuccucugaac

SEQ ID NO: 36052 - RNA, 21 nt, Artificial Sequence
  RPE65 RNA guide
aauccguacagcccaugugga

SEQ ID NO: 36053 - RNA, 21 nt, Artificial Sequence
  RPE65 RNA guide
aauccuaguuggccagagcag

SEQ ID NO: 36054 - RNA, 21 nt, Artificial Sequence
  RPE65 RNA guide
aaucucccucuguuacuuuua

SEQ ID NO: 36055 - RNA, 21 nt, Artificial Sequence
  RPE65 RNA guide
aaugcacaacaugaagaauaa

SEQ ID NO: 36056 - RNA, 21 nt, Artificial Sequence
  RPE65 RNA guide
aauggccauucuaagcuccac

SEQ ID NO: 36057 - RNA, 21 nt, Artificial Sequence
  RPE65 RNA guide
aauggccauucuauguguccu

SEQ ID NO: 36058 - RNA, 21 nt, Artificial Sequence
  RPE65 RNA guide
aaugucccuugaguuuacguu

SEQ ID NO: 36059 - RNA, 21 nt, Artificial Sequence
  RPE65 RNA guide
aauuauauucuucucaaucuc

SEQ ID NO: 36060 - RNA, 21 nt, Artificial Sequence
  RPE65 RNA guide
aauucagcacaccauguccgg

SEQ ID NO: 36061 - RNA, 21 nt, Artificial Sequence
  RPE65 RNA guide
aauuccggacauggugugcug

SEQ ID NO: 36062 - RNA, 21 nt, Artificial Sequence
  RPE65 RNA guide
aauugagguucagaggaguua

SEQ ID NO: 36063 - RNA, 21 nt, Artificial Sequence
  RPE65 RNA guide
aauuuccucaucugugagguu

SEQ ID NO: 36064 - RNA, 21 nt, Artificial Sequence
  RPE65 RNA guide
aauuuucccaguaaguuuagg

SEQ ID NO: 36065 - RNA, 21 nt, Artificial Sequence
  RPE65 RNA guide
acaacaugaacuuucuauauc

SEQ ID NO: 36066 - RNA, 21 nt, Artificial Sequence
  RPE65 RNA guide
acaaucauaaaugcacaacau

SEQ ID NO: 36067 - RNA, 21 nt, Artificial Sequence
  RPE65 RNA guide
acaaugucccuugaguuuacg

SEQ ID NO: 36068 - RNA, 21 nt, Artificial Sequence
  RPE65 RNA guide
acacaaugucccuugaguuua

SEQ ID NO: 36069 - RNA, 21 nt, Artificial Sequence
  RPE65 RNA guide
acacauagaauggccauucua

SEQ ID NO: 36070 - RNA, 21 nt, Artificial Sequence
  RPE65 RNA guide
acaccaugcagcccuggggga

SEQ ID NO: 36071 - RNA, 21 nt, Artificial Sequence
  RPE65 RNA guide
acaccauguccggaauuuucc

SEQ ID NO: 36072 - RNA, 21 nt, Artificial Sequence
  RPE65 RNA guide
acagcccauguggagcuuaga

SEQ ID NO: 36073 - RNA, 21 nt, Artificial Sequence
  RPE65 RNA guide
acaggagcaauccguacagcc

SEQ ID NO: 36074 - RNA, 21 nt, Artificial Sequence
  RPE65 RNA guide
acauaaaaguaacagagggag

SEQ ID NO: 36075 - RNA, 21 nt, Artificial Sequence
  RPE65 RNA guide
acauagaauggccauucuaag

SEQ ID NO: 36076 - RNA, 21 nt, Artificial Sequence
  RPE65 RNA guide
acauaggacccccacccccau

SEQ ID NO: 36077 - RNA, 21 nt, Artificial Sequence
  RPE65 RNA guide
acauagggaagaguauagaca

SEQ ID NO: 36078 - RNA, 21 nt, Artificial Sequence
  RPE65 RNA guide
acauaugccaaucacuuaacu

SEQ ID NO: 36079 - RNA, 21 nt, Artificial Sequence
  RPE65 RNA guide
acaugaacuuucuauaucaca

SEQ ID NO: 36080 - RNA, 21 nt, Artificial Sequence
  RPE65 RNA guide
acaugggcuguacggauugcu

SEQ ID NO: 36081 - RNA, 21 nt, Artificial Sequence
  RPE65 RNA guide
acauugaaacauagggaagag

SEQ ID NO: 36082 - RNA, 21 nt, Artificial Sequence
  RPE65 RNA guide
acauugugucugcccugcuug

SEQ ID NO: 36083 - RNA, 21 nt, Artificial Sequence
  RPE65 RNA guide
accaagcagggcagacacaau

SEQ ID NO: 36084 - RNA, 21 nt, Artificial Sequence
  RPE65 RNA guide
accaugcagcccugggggaag

SEQ ID NO: 36085 - RNA, 21 nt, Artificial Sequence
  RPE65 RNA guide
accauguccggaauuuuccca

SEQ ID NO: 36086 - RNA, 21 nt, Artificial Sequence
  RPE65 RNA guide
acccagcuuggccacauaugc

SEQ ID NO: 36087 - RNA, 21 nt, Artificial Sequence
  RPE65 RNA guide
accccaagaaagugagcuaau

SEQ ID NO: 36088 - RNA, 21 nt, Artificial Sequence
  RPE65 RNA guide
acccccacccccaucaccuau

SEQ ID NO: 36089 - RNA, 21 nt, Artificial Sequence
  RPE65 RNA guide
acccccaucaccuauaaccua

SEQ ID NO: 36090 - RNA, 21 nt, Artificial Sequence
  RPE65 RNA guide
acccuuuauucuucauguugu

SEQ ID NO: 36091 - RNA, 21 nt, Artificial Sequence
  RPE65 RNA guide
accuaaacuuacugggaaaau

SEQ ID NO: 36092 - RNA, 21 nt, Artificial Sequence
  RPE65 RNA guide
accuauaaccuaucaaccuaa

SEQ ID NO: 36093 - RNA, 21 nt, Artificial Sequence
  RPE65 RNA guide
accuaucaaccuaaacuuacu

SEQ ID NO: 36094 - RNA, 21 nt, Artificial Sequence
  RPE65 RNA guide
accucaauuuccucaucugug

SEQ ID NO: 36095 - RNA, 21 nt, Artificial Sequence
  RPE65 RNA guide
accucacagaugaggaaauug

SEQ ID NO: 36096 - RNA, 21 nt, Artificial Sequence
  RPE65 RNA guide
acggauugcuccugucuauac

SEQ ID NO: 36097 - RNA, 21 nt, Artificial Sequence
  RPE65 RNA guide
acguaaacucaagggacauug

SEQ ID NO: 36098 - RNA, 21 nt, Artificial Sequence
  RPE65 RNA guide
acuaggauucuaacccagcuu

SEQ ID NO: 36099 - RNA, 21 nt, Artificial Sequence
  RPE65 RNA guide
acucaagggacauugugucug

SEQ ID NO: 36100 - RNA, 21 nt, Artificial Sequence
  RPE65 RNA guide
acuccucugaaccucaauuuc

SEQ ID NO: 36101 - RNA, 21 nt, Artificial Sequence
  RPE65 RNA guide
acucuucccuauguuucaaug

SEQ ID NO: 36102 - RNA, 21 nt, Artificial Sequence
  RPE65 RNA guide
acugggaaaauuccggacaug

SEQ ID NO: 36103 - RNA, 21 nt, Artificial Sequence
  RPE65 RNA guide
acuuaacuccucugaaccuca

SEQ ID NO: 36104 - RNA, 21 nt, Artificial Sequence
  RPE65 RNA guide
acuuacugggaaaauuccgga

SEQ ID NO: 36105 - RNA, 21 nt, Artificial Sequence
  RPE65 RNA guide
acuucccccagggcugcaugg

SEQ ID NO: 36106 - RNA, 21 nt, Artificial Sequence
  RPE65 RNA guide
acuugaugaggacacauagaa

SEQ ID NO: 36107 - RNA, 21 nt, Artificial Sequence
  RPE65 RNA guide
acuuucuauaucacaccaugc

SEQ ID NO: 36108 - RNA, 21 nt, Artificial Sequence
  RPE65 RNA guide
acuuucuuggggugaccaagc

SEQ ID NO: 36109 - RNA, 21 nt, Artificial Sequence
  RPE65 RNA guide
agaaaaacauaaaaguaacag

SEQ ID NO: 36110 - RNA, 21 nt, Artificial Sequence
  RPE65 RNA guide
agaaagugagcuaauaaaacc

SEQ ID NO: 36111 - RNA, 21 nt, Artificial Sequence
  RPE65 RNA guide
agaaaguucauguuguccugc

SEQ ID NO: 36112 - RNA, 21 nt, Artificial Sequence
  RPE65 RNA guide
agaagaauauaauucagcaca

SEQ ID NO: 36113 - RNA, 21 nt, Artificial Sequence
  RPE65 RNA guide
agaauaaaggguuuuauuagc

SEQ ID NO: 36114 - RNA, 21 nt, Artificial Sequence
  RPE65 RNA guide
agaauccuaguuggccagagc

SEQ ID NO: 36115 - RNA, 21 nt, Artificial Sequence
  RPE65 RNA guide
agaauggccauucuaagcucc

SEQ ID NO: 36116 - RNA, 21 nt, Artificial Sequence
  RPE65 RNA guide
agaauggccauucuauguguc

SEQ ID NO: 36117 - RNA, 21 nt, Artificial Sequence
  RPE65 RNA guide
agacacaaugucccuugaguu

SEQ ID NO: 36118 - RNA, 21 nt, Artificial Sequence
  RPE65 RNA guide
agacaggagcaauccguacag

SEQ ID NO: 36119 - RNA, 21 nt, Artificial Sequence
  RPE65 RNA guide
agagcaggacaacaugaacuu

SEQ ID NO: 36120 - RNA, 21 nt, Artificial Sequence
  RPE65 RNA guide
agaggaguuaagugauuggca

SEQ ID NO: 36121 - RNA, 21 nt, Artificial Sequence
  RPE65 RNA guide
agaguauagacaggagcaauc

SEQ ID NO: 36122 - RNA, 21 nt, Artificial Sequence
  RPE65 RNA guide
agauaaaaacguaaacucaag

SEQ ID NO: 36123 - RNA, 21 nt, Artificial Sequence
  RPE65 RNA guide
agcaauccguacagcccaugu

SEQ ID NO: 36124 - RNA, 21 nt, Artificial Sequence
  RPE65 RNA guide
agcacaccauguccggaauuu

SEQ ID NO: 36125 - RNA, 21 nt, Artificial Sequence
  RPE65 RNA guide
agcaggacaacaugaacuuuc

SEQ ID NO: 36126 - RNA, 21 nt, Artificial Sequence
  RPE65 RNA guide
agcagggcagacacaaugucc

SEQ ID NO: 36127 - RNA, 21 nt, Artificial Sequence
  RPE65 RNA guide
agcccauguggagcuuagaau

SEQ ID NO: 36128 - RNA, 21 nt, Artificial Sequence
  RPE65 RNA guide
agcccugggggaaguucacau

SEQ ID NO: 36129 - RNA, 21 nt, Artificial Sequence
  RPE65 RNA guide
agcucacuuucuuggggugac

SEQ ID NO: 36130 - RNA, 21 nt, Artificial Sequence
  RPE65 RNA guide
agcuccacaugggcuguacgg

SEQ ID NO: 36131 - RNA, 21 nt, Artificial Sequence
  RPE65 RNA guide
agcuggguuagaauccuaguu

SEQ ID NO: 36132 - RNA, 21 nt, Artificial Sequence
  RPE65 RNA guide
agcuuagaauggccauucuau

SEQ ID NO: 36133 - RNA, 21 nt, Artificial Sequence
  RPE65 RNA guide
agcuuggccacauaugccaau

SEQ ID NO: 36134 - RNA, 21 nt, Artificial Sequence
  RPE65 RNA guide
aggaaauugagguucagagga

SEQ ID NO: 36135 - RNA, 21 nt, Artificial Sequence
  RPE65 RNA guide
aggacaacaugaacuuucuau

SEQ ID NO: 36136 - RNA, 21 nt, Artificial Sequence
  RPE65 RNA guide
aggacacauagaauggccauu

SEQ ID NO: 36137 - RNA, 21 nt, Artificial Sequence
  RPE65 RNA guide
aggacauugaaacauagggaa

SEQ ID NO: 36138 - RNA, 21 nt, Artificial Sequence
  RPE65 RNA guide
aggacccccacccccaucacc

SEQ ID NO: 36139 - RNA, 21 nt, Artificial Sequence
  RPE65 RNA guide
aggagcaauccguacagccca

SEQ ID NO: 36140 - RNA, 21 nt, Artificial Sequence
  RPE65 RNA guide
aggaguuaagugauuggcaua

SEQ ID NO: 36141 - RNA, 21 nt, Artificial Sequence
  RPE65 RNA guide
aggauucuaacccagcuuggc

SEQ ID NO: 36142 - RNA, 21 nt, Artificial Sequence
  RPE65 RNA guide
agggaagaguauagacaggag

SEQ ID NO: 36143 - RNA, 21 nt, Artificial Sequence
  RPE65 RNA guide
agggacauugugucugcccug

SEQ ID NO: 36144 - RNA, 21 nt, Artificial Sequence
  RPE65 RNA guide
agggcagacacaaugucccuu

SEQ ID NO: 36145 - RNA, 21 nt, Artificial Sequence
  RPE65 RNA guide
agggcugcauggugugauaua

SEQ ID NO: 36146 - RNA, 21 nt, Artificial Sequence
  RPE65 RNA guide
aggguuuuauuagcucacuuu

SEQ ID NO: 36147 - RNA, 21 nt, Artificial Sequence
  RPE65 RNA guide
aggugaugggggugggggucc

SEQ ID NO: 36148 - RNA, 21 nt, Artificial Sequence
  RPE65 RNA guide
agguuauaggugaugggggug

SEQ ID NO: 36149 - RNA, 21 nt, Artificial Sequence
  RPE65 RNA guide
agguucagaggaguuaaguga

SEQ ID NO: 36150 - RNA, 21 nt, Artificial Sequence
  RPE65 RNA guide
agguugauagguuauagguga

SEQ ID NO: 36151 - RNA, 21 nt, Artificial Sequence
  RPE65 RNA guide
aguauagacaggagcaauccg

SEQ ID NO: 36152 - RNA, 21 nt, Artificial Sequence
  RPE65 RNA guide
agucacaaucauaaaugcaca

SEQ ID NO: 36153 - RNA, 21 nt, Artificial Sequence
  RPE65 RNA guide
agugagcuaauaaaacccuuu

SEQ ID NO: 36154 - RNA, 21 nt, Artificial Sequence
  RPE65 RNA guide
agugauuggcauauguggcca

SEQ ID NO: 36155 - RNA, 21 nt, Artificial Sequence
  RPE65 RNA guide
aguuaagugauuggcauaugu

SEQ ID NO: 36156 - RNA, 21 nt, Artificial Sequence
  RPE65 RNA guide
aguucacauaggacccccacc

SEQ ID NO: 36157 - RNA, 21 nt, Artificial Sequence
  RPE65 RNA guide
aguucauguuguccugcucug

SEQ ID NO: 36158 - RNA, 21 nt, Artificial Sequence
  RPE65 RNA guide
aguuggccagagcaggacaac

SEQ ID NO: 36159 - RNA, 21 nt, Artificial Sequence
  RPE65 RNA guide
aguuuagguugauagguuaua

SEQ ID NO: 36160 - RNA, 21 nt, Artificial Sequence
  RPE65 RNA guide
auaaaaacguaaacucaaggg

SEQ ID NO: 36161 - RNA, 21 nt, Artificial Sequence
  RPE65 RNA guide
auaaaaguaacagagggagau

SEQ ID NO: 36162 - RNA, 21 nt, Artificial Sequence
  RPE65 RNA guide
auaaccuaucaaccuaaacuu

SEQ ID NO: 36163 - RNA, 21 nt, Artificial Sequence
  RPE65 RNA guide
auaauucagcacaccaugucc

SEQ ID NO: 36164 - RNA, 21 nt, Artificial Sequence
  RPE65 RNA guide
auacucuucccuauguuucaa

SEQ ID NO: 36165 - RNA, 21 nt, Artificial Sequence
  RPE65 RNA guide
auagaaaguucauguuguccu

SEQ ID NO: 36166 - RNA, 21 nt, Artificial Sequence
  RPE65 RNA guide
auagaauggccauucuaagcu

SEQ ID NO: 36167 - RNA, 21 nt, Artificial Sequence
  RPE65 RNA guide
auagacaggagcaauccguac

SEQ ID NO: 36168 - RNA, 21 nt, Artificial Sequence
  RPE65 RNA guide
auaggacccccacccccauca

SEQ ID NO: 36169 - RNA, 21 nt, Artificial Sequence
  RPE65 RNA guide
auagggaagaguauagacagg

SEQ ID NO: 36170 - RNA, 21 nt, Artificial Sequence
  RPE65 RNA guide
auaggugaugggggugggggu

SEQ ID NO: 36171 - RNA, 21 nt, Artificial Sequence
  RPE65 RNA guide
auagguuauaggugauggggg

SEQ ID NO: 36172 - RNA, 21 nt, Artificial Sequence
  RPE65 RNA guide
auauaauucagcacaccaugu

SEQ ID NO: 36173 - RNA, 21 nt, Artificial Sequence
  RPE65 RNA guide
auauagaaaguucauguuguc

SEQ ID NO: 36174 - RNA, 21 nt, Artificial Sequence
  RPE65 RNA guide
auaucacaccaugcagcccug

SEQ ID NO: 36175 - RNA, 21 nt, Artificial Sequence
  RPE65 RNA guide
auaugccaaucacuuaacucc

SEQ ID NO: 36176 - RNA, 21 nt, Artificial Sequence
  RPE65 RNA guide
auauguggccaagcuggguua

SEQ ID NO: 36177 - RNA, 21 nt, Artificial Sequence
  RPE65 RNA guide
aucaaccuaaacuuacuggga

SEQ ID NO: 36178 - RNA, 21 nt, Artificial Sequence
  RPE65 RNA guide
aucaagucacaaucauaaaug

SEQ ID NO: 36179 - RNA, 21 nt, Artificial Sequence
  RPE65 RNA guide
aucacaccaugcagcccuggg

SEQ ID NO: 36180 - RNA, 21 nt, Artificial Sequence
  RPE65 RNA guide
aucaccuauaaccuaucaacc

SEQ ID NO: 36181 - RNA, 21 nt, Artificial Sequence
  RPE65 RNA guide
aucacuuaacuccucugaacc

SEQ ID NO: 36182 - RNA, 21 nt, Artificial Sequence
  RPE65 RNA guide
auccguacagcccauguggag

SEQ ID NO: 36183 - RNA, 21 nt, Artificial Sequence
  RPE65 RNA guide
auccuaguuggccagagcagg

SEQ ID NO: 36184 - RNA, 21 nt, Artificial Sequence
  RPE65 RNA guide
aucucccucuguuacuuuuau

SEQ ID NO: 36185 - RNA, 21 nt, Artificial Sequence
  RPE65 RNA guide
aucuuuuaaaccucacagaug

SEQ ID NO: 36186 - RNA, 21 nt, Artificial Sequence
  RPE65 RNA guide
augaacuuucuauaucacacc

SEQ ID NO: 36187 - RNA, 21 nt, Artificial Sequence
  RPE65 RNA guide
augaggaaauugagguucaga

SEQ ID NO: 36188 - RNA, 21 nt, Artificial Sequence
  RPE65 RNA guide
augaggacacauagaauggcc

SEQ ID NO: 36189 - RNA, 21 nt, Artificial Sequence
  RPE65 RNA guide
augauugugacuugaugagga

SEQ ID NO: 36190 - RNA, 21 nt, Artificial Sequence
  RPE65 RNA guide
augcacaacaugaagaauaaa

SEQ ID NO: 36191 - RNA, 21 nt, Artificial Sequence
  RPE65 RNA guide
augcagcccugggggaaguuc

SEQ ID NO: 36192 - RNA, 21 nt, Artificial Sequence
  RPE65 RNA guide
augccaaucacuuaacuccuc

SEQ ID NO: 36193 - RNA, 21 nt, Artificial Sequence
  RPE65 RNA guide
auggccauucuaagcuccaca

SEQ ID NO: 36194 - RNA, 21 nt, Artificial Sequence
  RPE65 RNA guide
auggccauucuauguguccuc

SEQ ID NO: 36195 - RNA, 21 nt, Artificial Sequence
  RPE65 RNA guide
augggcuguacggauugcucc

SEQ ID NO: 36196 - RNA, 21 nt, Artificial Sequence
  RPE65 RNA guide
auggggguggggguccuaugu

SEQ ID NO: 36197 - RNA, 21 nt, Artificial Sequence
  RPE65 RNA guide
auggugugauauagaaaguuc

SEQ ID NO: 36198 - RNA, 21 nt, Artificial Sequence
  RPE65 RNA guide
augucccuugaguuuacguuu

SEQ ID NO: 36199 - RNA, 21 nt, Artificial Sequence
  RPE65 RNA guide
auguccggaauuuucccagua

SEQ ID NO: 36200 - RNA, 21 nt, Artificial Sequence
  RPE65 RNA guide
augugaacuucccccagggcu

SEQ ID NO: 36201 - RNA, 21 nt, Artificial Sequence
  RPE65 RNA guide
auguggagcuuagaauggcca

SEQ ID NO: 36202 - RNA, 21 nt, Artificial Sequence
  RPE65 RNA guide
auguggccaagcuggguuaga

SEQ ID NO: 36203 - RNA, 21 nt, Artificial Sequence
  RPE65 RNA guide
auguguccucaucaagucaca

SEQ ID NO: 36204 - RNA, 21 nt, Artificial Sequence
  RPE65 RNA guide
auguuguccugcucuggccaa

SEQ ID NO: 36205 - RNA, 21 nt, Artificial Sequence
  RPE65 RNA guide
auguugugcauuuaugauugu

SEQ ID NO: 36206 - RNA, 21 nt, Artificial Sequence
  RPE65 RNA guide
auuagcucacuuucuuggggu

SEQ ID NO: 36207 - RNA, 21 nt, Artificial Sequence
  RPE65 RNA guide
auuauauucuucucaaucucc

SEQ ID NO: 36208 - RNA, 21 nt, Artificial Sequence
  RPE65 RNA guide
auucagcacaccauguccgga

SEQ ID NO: 36209 - RNA, 21 nt, Artificial Sequence
  RPE65 RNA guide
auuccggacauggugugcuga

SEQ ID NO: 36210 - RNA, 21 nt, Artificial Sequence
  RPE65 RNA guide
auucuaacccagcuuggccac

SEQ ID NO: 36211 - RNA, 21 nt, Artificial Sequence
  RPE65 RNA guide
auucuaagcuccacaugggcu

SEQ ID NO: 36212 - RNA, 21 nt, Artificial Sequence
  RPE65 RNA guide
auucuauguguccucaucaag

SEQ ID NO: 36213 - RNA, 21 nt, Artificial Sequence
  RPE65 RNA guide
auugaaacauagggaagagua

SEQ ID NO: 36214 - RNA, 21 nt, Artificial Sequence
  RPE65 RNA guide
auugagguucagaggaguuaa

SEQ ID NO: 36215 - RNA, 21 nt, Artificial Sequence
  RPE65 RNA guide
auugcuccugucuauacucuu

SEQ ID NO: 36216 - RNA, 21 nt, Artificial Sequence
  RPE65 RNA guide
auuggcauauguggccaagcu

SEQ ID NO: 36217 - RNA, 21 nt, Artificial Sequence
  RPE65 RNA guide
auugugacuugaugaggacac

SEQ ID NO: 36218 - RNA, 21 nt, Artificial Sequence
  RPE65 RNA guide
auugugucugcccugcuuggu

SEQ ID NO: 36219 - RNA, 21 nt, Artificial Sequence
  RPE65 RNA guide
auuuaugauugugacuugaug

SEQ ID NO: 36220 - RNA, 21 nt, Artificial Sequence
  RPE65 RNA guide
auuuccucaucugugagguuu

SEQ ID NO: 36221 - RNA, 21 nt, Artificial Sequence
  RPE65 RNA guide
auuuucccaguaaguuuaggu

SEQ ID NO: 36222 - RNA, 21 nt, Artificial Sequence
  RPE65 RNA guide
caacaugaacuuucuauauca

SEQ ID NO: 36223 - RNA, 21 nt, Artificial Sequence
  RPE65 RNA guide
caaccuaaacuuacugggaaa

SEQ ID NO: 36224 - RNA, 21 nt, Artificial Sequence
  RPE65 RNA guide
caacuaggauucuaacccagc

SEQ ID NO: 36225 - RNA, 21 nt, Artificial Sequence
  RPE65 RNA guide
caagaaagugagcuaauaaaa

SEQ ID NO: 36226 - RNA, 21 nt, Artificial Sequence
  RPE65 RNA guide
caagcagggcagacacaaugu

SEQ ID NO: 36227 - RNA, 21 nt, Artificial Sequence
  RPE65 RNA guide
caagcuggguuagaauccuag

SEQ ID NO: 36228 - RNA, 21 nt, Artificial Sequence
  RPE65 RNA guide
caagggacauugugucugccc

SEQ ID NO: 36229 - RNA, 21 nt, Artificial Sequence
  RPE65 RNA guide
caagucacaaucauaaaugca

SEQ ID NO: 36230 - RNA, 21 nt, Artificial Sequence
  RPE65 RNA guide
caaucacuuaacuccucugaa

SEQ ID NO: 36231 - RNA, 21 nt, Artificial Sequence
  RPE65 RNA guide
caaucauaaaugcacaacaug

SEQ ID NO: 36232 - RNA, 21 nt, Artificial Sequence
  RPE65 RNA guide
caauccguacagcccaugugg

SEQ ID NO: 36233 - RNA, 21 nt, Artificial Sequence
  RPE65 RNA guide
caaucucccucuguuacuuuu

SEQ ID NO: 36234 - RNA, 21 nt, Artificial Sequence
  RPE65 RNA guide
caaugucccuugaguuuacgu

SEQ ID NO: 36235 - RNA, 21 nt, Artificial Sequence
  RPE65 RNA guide
caauuuccucaucugugaggu

SEQ ID NO: 36236 - RNA, 21 nt, Artificial Sequence
  RPE65 RNA guide
cacaacaugaagaauaaaggg

SEQ ID NO: 36237 - RNA, 21 nt, Artificial Sequence
  RPE65 RNA guide
cacaaucauaaaugcacaaca

SEQ ID NO: 36238 - RNA, 21 nt, Artificial Sequence
  RPE65 RNA guide
cacaaugucccuugaguuuac

SEQ ID NO: 36239 - RNA, 21 nt, Artificial Sequence
  RPE65 RNA guide
cacaccaugcagcccuggggg

SEQ ID NO: 36240 - RNA, 21 nt, Artificial Sequence
  RPE65 RNA guide
cacaccauguccggaauuuuc

SEQ ID NO: 36241 - RNA, 21 nt, Artificial Sequence
  RPE65 RNA guide
cacagaugaggaaauugaggu

SEQ ID NO: 36242 - RNA, 21 nt, Artificial Sequence
  RPE65 RNA guide
cacauagaauggccauucuaa

SEQ ID NO: 36243 - RNA, 21 nt, Artificial Sequence
  RPE65 RNA guide
cacauaggacccccaccccca

SEQ ID NO: 36244 - RNA, 21 nt, Artificial Sequence
  RPE65 RNA guide
cacauaugccaaucacuuaac

SEQ ID NO: 36245 - RNA, 21 nt, Artificial Sequence
  RPE65 RNA guide
cacaugggcuguacggauugc

SEQ ID NO: 36246 - RNA, 21 nt, Artificial Sequence
  RPE65 RNA guide
caccaugcagcccugggggaa

SEQ ID NO: 36247 - RNA, 21 nt, Artificial Sequence
  RPE65 RNA guide
caccauguccggaauuuuccc

SEQ ID NO: 36248 - RNA, 21 nt, Artificial Sequence
  RPE65 RNA guide
caccccaagaaagugagcuaa

SEQ ID NO: 36249 - RNA, 21 nt, Artificial Sequence
  RPE65 RNA guide
cacccccaucaccuauaaccu

SEQ ID NO: 36250 - RNA, 21 nt, Artificial Sequence
  RPE65 RNA guide
caccuauaaccuaucaaccua

SEQ ID NO: 36251 - RNA, 21 nt, Artificial Sequence
  RPE65 RNA guide
cacuuaacuccucugaaccuc

SEQ ID NO: 36252 - RNA, 21 nt, Artificial Sequence
  RPE65 RNA guide
cacuuucuuggggugaccaag

SEQ ID NO: 36253 - RNA, 21 nt, Artificial Sequence
  RPE65 RNA guide
cagacacaaugucccuugagu

SEQ ID NO: 36254 - RNA, 21 nt, Artificial Sequence
  RPE65 RNA guide
cagagcaggacaacaugaacu

SEQ ID NO: 36255 - RNA, 21 nt, Artificial Sequence
  RPE65 RNA guide
cagaggaguuaagugauuggc

SEQ ID NO: 36256 - RNA, 21 nt, Artificial Sequence
  RPE65 RNA guide
cagcacaccauguccggaauu

SEQ ID NO: 36257 - RNA, 21 nt, Artificial Sequence
  RPE65 RNA guide
cagcccauguggagcuuagaa

SEQ ID NO: 36258 - RNA, 21 nt, Artificial Sequence
  RPE65 RNA guide
cagcccugggggaaguucaca

SEQ ID NO: 36259 - RNA, 21 nt, Artificial Sequence
  RPE65 RNA guide
cagcuuggccacauaugccaa

SEQ ID NO: 36260 - RNA, 21 nt, Artificial Sequence
  RPE65 RNA guide
caggacaacaugaacuuucua

SEQ ID NO: 36261 - RNA, 21 nt, Artificial Sequence
  RPE65 RNA guide
caggagcaauccguacagccc

SEQ ID NO: 36262 - RNA, 21 nt, Artificial Sequence
  RPE65 RNA guide
cagggcagacacaaugucccu

SEQ ID NO: 36263 - RNA, 21 nt, Artificial Sequence
  RPE65 RNA guide
cagggcugcauggugugauau

SEQ ID NO: 36264 - RNA, 21 nt, Artificial Sequence
  RPE65 RNA guide
caguaaguuuagguugauagg

SEQ ID NO: 36265 - RNA, 21 nt, Artificial Sequence
  RPE65 RNA guide
cauaaaaguaacagagggaga

SEQ ID NO: 36266 - RNA, 21 nt, Artificial Sequence
  RPE65 RNA guide
cauagaauggccauucuaagc

SEQ ID NO: 36267 - RNA, 21 nt, Artificial Sequence
  RPE65 RNA guide
cauaggacccccacccccauc

SEQ ID NO: 36268 - RNA, 21 nt, Artificial Sequence
  RPE65 RNA guide
cauagggaagaguauagacag

SEQ ID NO: 36269 - RNA, 21 nt, Artificial Sequence
  RPE65 RNA guide
cauaugccaaucacuuaacuc

SEQ ID NO: 36270 - RNA, 21 nt, Artificial Sequence
  RPE65 RNA guide
cauauguggccaagcuggguu

SEQ ID NO: 36271 - RNA, 21 nt, Artificial Sequence
  RPE65 RNA guide
caucaagucacaaucauaaau

SEQ ID NO: 36272 - RNA, 21 nt, Artificial Sequence
  RPE65 RNA guide
caucaccuauaaccuaucaac

SEQ ID NO: 36273 - RNA, 21 nt, Artificial Sequence
  RPE65 RNA guide
caugaacuuucuauaucacac

SEQ ID NO: 36274 - RNA, 21 nt, Artificial Sequence
  RPE65 RNA guide
caugcagcccugggggaaguu

SEQ ID NO: 36275 - RNA, 21 nt, Artificial Sequence
  RPE65 RNA guide
caugggcuguacggauugcuc

SEQ ID NO: 36276 - RNA, 21 nt, Artificial Sequence
  RPE65 RNA guide
cauggugugauauagaaaguu

SEQ ID NO: 36277 - RNA, 21 nt, Artificial Sequence
  RPE65 RNA guide
cauguccggaauuuucccagu

SEQ ID NO: 36278 - RNA, 21 nt, Artificial Sequence
  RPE65 RNA guide
cauguggagcuuagaauggcc

SEQ ID NO: 36279 - RNA, 21 nt, Artificial Sequence
  RPE65 RNA guide
cauguuguccugcucuggcca

SEQ ID NO: 36280 - RNA, 21 nt, Artificial Sequence
  RPE65 RNA guide
cauguugugcauuuaugauug

SEQ ID NO: 36281 - RNA, 21 nt, Artificial Sequence
  RPE65 RNA guide
cauucuaagcuccacaugggc

SEQ ID NO: 36282 - RNA, 21 nt, Artificial Sequence
  RPE65 RNA guide
cauucuauguguccucaucaa

SEQ ID NO: 36283 - RNA, 21 nt, Artificial Sequence
  RPE65 RNA guide
cauugaaacauagggaagagu

SEQ ID NO: 36284 - RNA, 21 nt, Artificial Sequence
  RPE65 RNA guide
cauugugucugcccugcuugg

SEQ ID NO: 36285 - RNA, 21 nt, Artificial Sequence
  RPE65 RNA guide
cauuuaugauugugacuugau

SEQ ID NO: 36286 - RNA, 21 nt, Artificial Sequence
  RPE65 RNA guide
ccaacuaggauucuaacccag

SEQ ID NO: 36287 - RNA, 21 nt, Artificial Sequence
  RPE65 RNA guide
ccaagaaagugagcuaauaaa

SEQ ID NO: 36288 - RNA, 21 nt, Artificial Sequence
  RPE65 RNA guide
ccaagcagggcagacacaaug

SEQ ID NO: 36289 - RNA, 21 nt, Artificial Sequence
  RPE65 RNA guide
ccaagcuggguuagaauccua

SEQ ID NO: 36290 - RNA, 21 nt, Artificial Sequence
  RPE65 RNA guide
ccaaucacuuaacuccucuga

SEQ ID NO: 36291 - RNA, 21 nt, Artificial Sequence
  RPE65 RNA guide
ccacauaugccaaucacuuaa

SEQ ID NO: 36292 - RNA, 21 nt, Artificial Sequence
  RPE65 RNA guide
ccacaugggcuguacggauug

SEQ ID NO: 36293 - RNA, 21 nt, Artificial Sequence
  RPE65 RNA guide
ccacccccaucaccuauaacc

SEQ ID NO: 36294 - RNA, 21 nt, Artificial Sequence
  RPE65 RNA guide
ccagagcaggacaacaugaac

SEQ ID NO: 36295 - RNA, 21 nt, Artificial Sequence
  RPE65 RNA guide
ccagcuuggccacauaugcca

SEQ ID NO: 36296 - RNA, 21 nt, Artificial Sequence
  RPE65 RNA guide
ccagggcugcauggugugaua

SEQ ID NO: 36297 - RNA, 21 nt, Artificial Sequence
  RPE65 RNA guide
ccaguaaguuuagguugauag

SEQ ID NO: 36298 - RNA, 21 nt, Artificial Sequence
  RPE65 RNA guide
ccaucaccuauaaccuaucaa

SEQ ID NO: 36299 - RNA, 21 nt, Artificial Sequence
  RPE65 RNA guide
ccaugcagcccugggggaagu

SEQ ID NO: 36300 - RNA, 21 nt, Artificial Sequence
  RPE65 RNA guide
ccauguccggaauuuucccag

SEQ ID NO: 36301 - RNA, 21 nt, Artificial Sequence
  RPE65 RNA guide
ccauguggagcuuagaauggc

SEQ ID NO: 36302 - RNA, 21 nt, Artificial Sequence
  RPE65 RNA guide
ccauucuaagcuccacauggg

SEQ ID NO: 36303 - RNA, 21 nt, Artificial Sequence
  RPE65 RNA guide
ccauucuauguguccucauca

SEQ ID NO: 36304 - RNA, 21 nt, Artificial Sequence
  RPE65 RNA guide
cccaagaaagugagcuaauaa

SEQ ID NO: 36305 - RNA, 21 nt, Artificial Sequence
  RPE65 RNA guide
cccacccccaucaccuauaac

SEQ ID NO: 36306 - RNA, 21 nt, Artificial Sequence
  RPE65 RNA guide
cccagcuuggccacauaugcc

SEQ ID NO: 36307 - RNA, 21 nt, Artificial Sequence
  RPE65 RNA guide
cccagggcugcauggugugau

SEQ ID NO: 36308 - RNA, 21 nt, Artificial Sequence
  RPE65 RNA guide
cccaguaaguuuagguugaua

SEQ ID NO: 36309 - RNA, 21 nt, Artificial Sequence
  RPE65 RNA guide
cccaucaccuauaaccuauca

SEQ ID NO: 36310 - RNA, 21 nt, Artificial Sequence
  RPE65 RNA guide
cccauguggagcuuagaaugg

SEQ ID NO: 36311 - RNA, 21 nt, Artificial Sequence
  RPE65 RNA guide
ccccaagaaagugagcuaaua

SEQ ID NO: 36312 - RNA, 21 nt, Artificial Sequence
  RPE65 RNA guide
ccccacccccaucaccuauaa

SEQ ID NO: 36313 - RNA, 21 nt, Artificial Sequence
  RPE65 RNA guide
ccccagggcugcaugguguga

SEQ ID NO: 36314 - RNA, 21 nt, Artificial Sequence
  RPE65 RNA guide
ccccaucaccuauaaccuauc

SEQ ID NO: 36315 - RNA, 21 nt, Artificial Sequence
  RPE65 RNA guide
cccccacccccaucaccuaua

SEQ ID NO: 36316 - RNA, 21 nt, Artificial Sequence
  RPE65 RNA guide
cccccagggcugcauggugug

SEQ ID NO: 36317 - RNA, 21 nt, Artificial Sequence
  RPE65 RNA guide
cccccaucaccuauaaccuau

SEQ ID NO: 36318 - RNA, 21 nt, Artificial Sequence
  RPE65 RNA guide
cccucuguuacuuuuauguuu

SEQ ID NO: 36319 - RNA, 21 nt, Artificial Sequence
  RPE65 RNA guide
cccugcuuggucaccccaaga

SEQ ID NO: 36320 - RNA, 21 nt, Artificial Sequence
  RPE65 RNA guide
cccugggggaaguucacauag

SEQ ID NO: 36321 - RNA, 21 nt, Artificial Sequence
  RPE65 RNA guide
cccuugaguuuacguuuuuau

SEQ ID NO: 36322 - RNA, 21 nt, Artificial Sequence
  RPE65 RNA guide
cccuuuauucuucauguugug

SEQ ID NO: 36323 - RNA, 21 nt, Artificial Sequence
  RPE65 RNA guide
ccggaauuuucccaguaaguu

SEQ ID NO: 36324 - RNA, 21 nt, Artificial Sequence
  RPE65 RNA guide
ccggacauggugugcugaauu

SEQ ID NO: 36325 - RNA, 21 nt, Artificial Sequence
  RPE65 RNA guide
ccguacagcccauguggagcu

SEQ ID NO: 36326 - RNA, 21 nt, Artificial Sequence
  RPE65 RNA guide
ccuaaacuuacugggaaaauu

SEQ ID NO: 36327 - RNA, 21 nt, Artificial Sequence
  RPE65 RNA guide
ccuaguuggccagagcaggac

SEQ ID NO: 36328 - RNA, 21 nt, Artificial Sequence
  RPE65 RNA guide
ccuauaaccuaucaaccuaaa

SEQ ID NO: 36329 - RNA, 21 nt, Artificial Sequence
  RPE65 RNA guide
ccuaucaaccuaaacuuacug

SEQ ID NO: 36330 - RNA, 21 nt, Artificial Sequence
  RPE65 RNA guide
ccuaugugaacuucccccagg

SEQ ID NO: 36331 - RNA, 21 nt, Artificial Sequence
  RPE65 RNA guide
ccucaauuuccucaucuguga

SEQ ID NO: 36332 - RNA, 21 nt, Artificial Sequence
  RPE65 RNA guide
ccucacagaugaggaaauuga

SEQ ID NO: 36333 - RNA, 21 nt, Artificial Sequence
  RPE65 RNA guide
ccucaucaagucacaaucaua

SEQ ID NO: 36334 - RNA, 21 nt, Artificial Sequence
  RPE65 RNA guide
ccucaucugugagguuuaaaa

SEQ ID NO: 36335 - RNA, 21 nt, Artificial Sequence
  RPE65 RNA guide
ccugcucuggccaacuaggau

SEQ ID NO: 36336 - RNA, 21 nt, Artificial Sequence
  RPE65 RNA guide
ccugcuuggucaccccaagaa

SEQ ID NO: 36337 - RNA, 21 nt, Artificial Sequence
  RPE65 RNA guide
ccugggggaaguucacauagg

SEQ ID NO: 36338 - RNA, 21 nt, Artificial Sequence
  RPE65 RNA guide
ccugucuauacucuucccuau

SEQ ID NO: 36339 - RNA, 21 nt, Artificial Sequence
  RPE65 RNA guide
ccuuuauucuucauguugugc

SEQ ID NO: 36340 - RNA, 21 nt, Artificial Sequence
  RPE65 RNA guide
cggaauuuucccaguaaguuu

SEQ ID NO: 36341 - RNA, 21 nt, Artificial Sequence
  RPE65 RNA guide
cggacauggugugcugaauua

SEQ ID NO: 36342 - RNA, 21 nt, Artificial Sequence
  RPE65 RNA guide
cggauugcuccugucuauacu

SEQ ID NO: 36343 - RNA, 21 nt, Artificial Sequence
  RPE65 RNA guide
cguaaacucaagggacauugu

SEQ ID NO: 36344 - RNA, 21 nt, Artificial Sequence
  RPE65 RNA guide
cguacagcccauguggagcuu

SEQ ID NO: 36345 - RNA, 21 nt, Artificial Sequence
  RPE65 RNA guide
cguuuuuaucuuuuaaaccuc

SEQ ID NO: 36346 - RNA, 21 nt, Artificial Sequence
  RPE65 RNA guide
cuaaacuuacugggaaaauuc

SEQ ID NO: 36347 - RNA, 21 nt, Artificial Sequence
  RPE65 RNA guide
cuaacccagcuuggccacaua

SEQ ID NO: 36348 - RNA, 21 nt, Artificial Sequence
  RPE65 RNA guide
cuaagcuccacaugggcugua

SEQ ID NO: 36349 - RNA, 21 nt, Artificial Sequence
  RPE65 RNA guide
cuaggauucuaacccagcuug

SEQ ID NO: 36350 - RNA, 21 nt, Artificial Sequence
  RPE65 RNA guide
cuaguuggccagagcaggaca

SEQ ID NO: 36351 - RNA, 21 nt, Artificial Sequence
  RPE65 RNA guide
cuauaaccuaucaaccuaaac

SEQ ID NO: 36352 - RNA, 21 nt, Artificial Sequence
  RPE65 RNA guide
cuauacucuucccuauguuuc

SEQ ID NO: 36353 - RNA, 21 nt, Artificial Sequence
  RPE65 RNA guide
cuauaucacaccaugcagccc

SEQ ID NO: 36354 - RNA, 21 nt, Artificial Sequence
  RPE65 RNA guide
cuaucaaccuaaacuuacugg

SEQ ID NO: 36355 - RNA, 21 nt, Artificial Sequence
  RPE65 RNA guide
cuaugugaacuucccccaggg

SEQ ID NO: 36356 - RNA, 21 nt, Artificial Sequence
  RPE65 RNA guide
cuauguguccucaucaaguca

SEQ ID NO: 36357 - RNA, 21 nt, Artificial Sequence
  RPE65 RNA guide
cucaagggacauugugucugc

SEQ ID NO: 36358 - RNA, 21 nt, Artificial Sequence
  RPE65 RNA guide
cucaaucucccucuguuacuu

SEQ ID NO: 36359 - RNA, 21 nt, Artificial Sequence
  RPE65 RNA guide
cucaauuuccucaucugugag

SEQ ID NO: 36360 - RNA, 21 nt, Artificial Sequence
  RPE65 RNA guide
cucacagaugaggaaauugag

SEQ ID NO: 36361 - RNA, 21 nt, Artificial Sequence
  RPE65 RNA guide
cucacuuucuuggggugacca

SEQ ID NO: 36362 - RNA, 21 nt, Artificial Sequence
  RPE65 RNA guide
cucaucaagucacaaucauaa

SEQ ID NO: 36363 - RNA, 21 nt, Artificial Sequence
  RPE65 RNA guide
cucaucugugagguuuaaaag

SEQ ID NO: 36364 - RNA, 21 nt, Artificial Sequence
  RPE65 RNA guide
cuccacaugggcuguacggau

SEQ ID NO: 36365 - RNA, 21 nt, Artificial Sequence
  RPE65 RNA guide
cucccucuguuacuuuuaugu

SEQ ID NO: 36366 - RNA, 21 nt, Artificial Sequence
  RPE65 RNA guide
cuccucugaaccucaauuucc

SEQ ID NO: 36367 - RNA, 21 nt, Artificial Sequence
  RPE65 RNA guide
cuccugucuauacucuucccu

SEQ ID NO: 36368 - RNA, 21 nt, Artificial Sequence
  RPE65 RNA guide
cucuggccaacuaggauucua

SEQ ID NO: 36369 - RNA, 21 nt, Artificial Sequence
  RPE65 RNA guide
cucuucccuauguuucaaugu

SEQ ID NO: 36370 - RNA, 21 nt, Artificial Sequence
  RPE65 RNA guide
cugaaccucaauuuccucauc

SEQ ID NO: 36371 - RNA, 21 nt, Artificial Sequence
  RPE65 RNA guide
cugaaggacauugaaacauag

SEQ ID NO: 36372 - RNA, 21 nt, Artificial Sequence
  RPE65 RNA guide
cugaauuauauucuucucaau

SEQ ID NO: 36373 - RNA, 21 nt, Artificial Sequence
  RPE65 RNA guide
cugcauggugugauauagaaa

SEQ ID NO: 36374 - RNA, 21 nt, Artificial Sequence
  RPE65 RNA guide
cugcccugcuuggucacccca

SEQ ID NO: 36375 - RNA, 21 nt, Artificial Sequence
  RPE65 RNA guide
cugcucuggccaacuaggauu

SEQ ID NO: 36376 - RNA, 21 nt, Artificial Sequence
  RPE65 RNA guide
cugcuuggucaccccaagaaa

SEQ ID NO: 36377 - RNA, 21 nt, Artificial Sequence
  RPE65 RNA guide
cuggccaacuaggauucuaac

SEQ ID NO: 36378 - RNA, 21 nt, Artificial Sequence
  RPE65 RNA guide
cugggaaaauuccggacaugg

SEQ ID NO: 36379 - RNA, 21 nt, Artificial Sequence
  RPE65 RNA guide
cugggggaaguucacauagga

SEQ ID NO: 36380 - RNA, 21 nt, Artificial Sequence
  RPE65 RNA guide
cuggguuagaauccuaguugg

SEQ ID NO: 36381 - RNA, 21 nt, Artificial Sequence
  RPE65 RNA guide
cuguacggauugcuccugucu

SEQ ID NO: 36382 - RNA, 21 nt, Artificial Sequence
  RPE65 RNA guide
cugucuauacucuucccuaug

SEQ ID NO: 36383 - RNA, 21 nt, Artificial Sequence
  RPE65 RNA guide
cugugagguuuaaaagauaaa

SEQ ID NO: 36384 - RNA, 21 nt, Artificial Sequence
  RPE65 RNA guide
cuuaacuccucugaaccucaa

SEQ ID NO: 36385 - RNA, 21 nt, Artificial Sequence
  RPE65 RNA guide
cuuacugggaaaauuccggac

SEQ ID NO: 36386 - RNA, 21 nt, Artificial Sequence
  RPE65 RNA guide
cuuagaauggccauucuaugu

SEQ ID NO: 36387 - RNA, 21 nt, Artificial Sequence
  RPE65 RNA guide
cuucauguugugcauuuauga

SEQ ID NO: 36388 - RNA, 21 nt, Artificial Sequence
  RPE65 RNA guide
cuucccccagggcugcauggu

SEQ ID NO: 36389 - RNA, 21 nt, Artificial Sequence
  RPE65 RNA guide
cuucccuauguuucaaugucc

SEQ ID NO: 36390 - RNA, 21 nt, Artificial Sequence
  RPE65 RNA guide
cuucucaaucucccucuguua

SEQ ID NO: 36391 - RNA, 21 nt, Artificial Sequence
  RPE65 RNA guide
cuugaugaggacacauagaau

SEQ ID NO: 36392 - RNA, 21 nt, Artificial Sequence
  RPE65 RNA guide
cuuggccacauaugccaauca

SEQ ID NO: 36393 - RNA, 21 nt, Artificial Sequence
  RPE65 RNA guide
cuuggggugaccaagcagggc

SEQ ID NO: 36394 - RNA, 21 nt, Artificial Sequence
  RPE65 RNA guide
cuuggucaccccaagaaagug

SEQ ID NO: 36395 - RNA, 21 nt, Artificial Sequence
  RPE65 RNA guide
cuuucuauaucacaccaugca

SEQ ID NO: 36396 - RNA, 21 nt, Artificial Sequence
  RPE65 RNA guide
cuuucuuggggugaccaagca

SEQ ID NO: 36397 - RNA, 21 nt, Artificial Sequence
  RPE65 RNA guide
cuuuuaaaccucacagaugag

SEQ ID NO: 36398 - RNA, 21 nt, Artificial Sequence
  RPE65 RNA guide
gaaaaacauaaaaguaacaga

SEQ ID NO: 36399 - RNA, 21 nt, Artificial Sequence
  RPE65 RNA guide
gaaaauuccggacauggugug

SEQ ID NO: 36400 - RNA, 21 nt, Artificial Sequence
  RPE65 RNA guide
gaaacauagggaagaguauag

SEQ ID NO: 36401 - RNA, 21 nt, Artificial Sequence
  RPE65 RNA guide
gaaagugagcuaauaaaaccc

SEQ ID NO: 36402 - RNA, 21 nt, Artificial Sequence
  RPE65 RNA guide
gaaaguucauguuguccugcu

SEQ ID NO: 36403 - RNA, 21 nt, Artificial Sequence
  RPE65 RNA guide
gaaauugagguucagaggagu

SEQ ID NO: 36404 - RNA, 21 nt, Artificial Sequence
  RPE65 RNA guide
gaaccucaauuuccucaucug

SEQ ID NO: 36405 - RNA, 21 nt, Artificial Sequence
  RPE65 RNA guide
gaacuucccccagggcugcau

SEQ ID NO: 36406 - RNA, 21 nt, Artificial Sequence
  RPE65 RNA guide
gaacuuucuauaucacaccau

SEQ ID NO: 36407 - RNA, 21 nt, Artificial Sequence
  RPE65 RNA guide
gaagaauaaaggguuuuauua

SEQ ID NO: 36408 - RNA, 21 nt, Artificial Sequence
  RPE65 RNA guide
gaagaguauagacaggagcaa

SEQ ID NO: 36409 - RNA, 21 nt, Artificial Sequence
  RPE65 RNA guide
gaaggacauugaaacauaggg

SEQ ID NO: 36410 - RNA, 21 nt, Artificial Sequence
  RPE65 RNA guide
gaaguucacauaggaccccca

SEQ ID NO: 36411 - RNA, 21 nt, Artificial Sequence
  RPE65 RNA guide
gaauaaaggguuuuauuagcu

SEQ ID NO: 36412 - RNA, 21 nt, Artificial Sequence
  RPE65 RNA guide
gaauauaauucagcacaccau

SEQ ID NO: 36413 - RNA, 21 nt, Artificial Sequence
  RPE65 RNA guide
gaauccuaguuggccagagca

SEQ ID NO: 36414 - RNA, 21 nt, Artificial Sequence
  RPE65 RNA guide
gaauggccauucuaagcucca

SEQ ID NO: 36415 - RNA, 21 nt, Artificial Sequence
  RPE65 RNA guide
gaauggccauucuaugugucc

SEQ ID NO: 36416 - RNA, 21 nt, Artificial Sequence
  RPE65 RNA guide
gaauuauauucuucucaaucu

SEQ ID NO: 36417 - RNA, 21 nt, Artificial Sequence
  RPE65 RNA guide
gaauuuucccaguaaguuuag

SEQ ID NO: 36418 - RNA, 21 nt, Artificial Sequence
  RPE65 RNA guide
gacaacaugaacuuucuauau

SEQ ID NO: 36419 - RNA, 21 nt, Artificial Sequence
  RPE65 RNA guide
gacacaaugucccuugaguuu

SEQ ID NO: 36420 - RNA, 21 nt, Artificial Sequence
  RPE65 RNA guide
gacacauagaauggccauucu

SEQ ID NO: 36421 - RNA, 21 nt, Artificial Sequence
  RPE65 RNA guide
gacaggagcaauccguacagc

SEQ ID NO: 36422 - RNA, 21 nt, Artificial Sequence
  RPE65 RNA guide
gacauugaaacauagggaaga

SEQ ID NO: 36423 - RNA, 21 nt, Artificial Sequence
  RPE65 RNA guide
gacauugugucugcccugcuu

SEQ ID NO: 36424 - RNA, 21 nt, Artificial Sequence
  RPE65 RNA guide
gaccaagcagggcagacacaa

SEQ ID NO: 36425 - RNA, 21 nt, Artificial Sequence
  RPE65 RNA guide
gacccccacccccaucaccua

SEQ ID NO: 36426 - RNA, 21 nt, Artificial Sequence
  RPE65 RNA guide
gacuugaugaggacacauaga

SEQ ID NO: 36427 - RNA, 21 nt, Artificial Sequence
  RPE65 RNA guide
gagauugagaagaauauaauu

SEQ ID NO: 36428 - RNA, 21 nt, Artificial Sequence
  RPE65 RNA guide
gagcaauccguacagcccaug

SEQ ID NO: 36429 - RNA, 21 nt, Artificial Sequence
  RPE65 RNA guide
gagcaggacaacaugaacuuu

SEQ ID NO: 36430 - RNA, 21 nt, Artificial Sequence
  RPE65 RNA guide
gagcuaauaaaacccuuuauu

SEQ ID NO: 36431 - RNA, 21 nt, Artificial Sequence
  RPE65 RNA guide
gagcuuagaauggccauucua

SEQ ID NO: 36432 - RNA, 21 nt, Artificial Sequence
  RPE65 RNA guide
gaggaaauugagguucagagg

SEQ ID NO: 36433 - RNA, 21 nt, Artificial Sequence
  RPE65 RNA guide
gaggacacauagaauggccau

SEQ ID NO: 36434 - RNA, 21 nt, Artificial Sequence
  RPE65 RNA guide
gaggaguuaagugauuggcau

SEQ ID NO: 36435 - RNA, 21 nt, Artificial Sequence
  RPE65 RNA guide
gagguucagaggaguuaagug

SEQ ID NO: 36436 - RNA, 21 nt, Artificial Sequence
  RPE65 RNA guide
gaguauagacaggagcaaucc

SEQ ID NO: 36437 - RNA, 21 nt, Artificial Sequence
  RPE65 RNA guide
gaguuaagugauuggcauaug

SEQ ID NO: 36438 - RNA, 21 nt, Artificial Sequence
  RPE65 RNA guide
gauaaaaacguaaacucaagg

SEQ ID NO: 36439 - RNA, 21 nt, Artificial Sequence
  RPE65 RNA guide
gauagguuauaggugaugggg

SEQ ID NO: 36440 - RNA, 21 nt, Artificial Sequence
  RPE65 RNA guide
gauauagaaaguucauguugu

SEQ ID NO: 36441 - RNA, 21 nt, Artificial Sequence
  RPE65 RNA guide
gaugaggacacauagaauggc

SEQ ID NO: 36442 - RNA, 21 nt, Artificial Sequence
  RPE65 RNA guide
gauggggguggggguccuaug

SEQ ID NO: 36443 - RNA, 21 nt, Artificial Sequence
  RPE65 RNA guide
gauucuaacccagcuuggcca

SEQ ID NO: 36444 - RNA, 21 nt, Artificial Sequence
  RPE65 RNA guide
gauugagaagaauauaauuca

SEQ ID NO: 36445 - RNA, 21 nt, Artificial Sequence
  RPE65 RNA guide
gauugcuccugucuauacucu

SEQ ID NO: 36446 - RNA, 21 nt, Artificial Sequence
  RPE65 RNA guide
gauuggcauauguggccaagc

SEQ ID NO: 36447 - RNA, 21 nt, Artificial Sequence
  RPE65 RNA guide
gauugugacuugaugaggaca

SEQ ID NO: 36448 - RNA, 21 nt, Artificial Sequence
  RPE65 RNA guide
gcaauccguacagcccaugug

SEQ ID NO: 36449 - RNA, 21 nt, Artificial Sequence
  RPE65 RNA guide
gcacaacaugaagaauaaagg

SEQ ID NO: 36450 - RNA, 21 nt, Artificial Sequence
  RPE65 RNA guide
gcacaccauguccggaauuuu

SEQ ID NO: 36451 - RNA, 21 nt, Artificial Sequence
  RPE65 RNA guide
gcagacacaaugucccuugag

SEQ ID NO: 36452 - RNA, 21 nt, Artificial Sequence
  RPE65 RNA guide
gcagcccugggggaaguucac

SEQ ID NO: 36453 - RNA, 21 nt, Artificial Sequence
  RPE65 RNA guide
gcaggacaacaugaacuuucu

SEQ ID NO: 36454 - RNA, 21 nt, Artificial Sequence
  RPE65 RNA guide
gcagggcagacacaauguccc

SEQ ID NO: 36455 - RNA, 21 nt, Artificial Sequence
  RPE65 RNA guide
gcauauguggccaagcugggu

SEQ ID NO: 36456 - RNA, 21 nt, Artificial Sequence
  RPE65 RNA guide
gcauggugugauauagaaagu

SEQ ID NO: 36457 - RNA, 21 nt, Artificial Sequence
  RPE65 RNA guide
gcauuuaugauugugacuuga

SEQ ID NO: 36458 - RNA, 21 nt, Artificial Sequence
  RPE65 RNA guide
gccaacuaggauucuaaccca

SEQ ID NO: 36459 - RNA, 21 nt, Artificial Sequence
  RPE65 RNA guide
gccaagcuggguuagaauccu

SEQ ID NO: 36460 - RNA, 21 nt, Artificial Sequence
  RPE65 RNA guide
gccaaucacuuaacuccucug

SEQ ID NO: 36461 - RNA, 21 nt, Artificial Sequence
  RPE65 RNA guide
gccacauaugccaaucacuua

SEQ ID NO: 36462 - RNA, 21 nt, Artificial Sequence
  RPE65 RNA guide
gccagagcaggacaacaugaa

SEQ ID NO: 36463 - RNA, 21 nt, Artificial Sequence
  RPE65 RNA guide
gccauucuaagcuccacaugg

SEQ ID NO: 36464 - RNA, 21 nt, Artificial Sequence
  RPE65 RNA guide
gccauucuauguguccucauc

SEQ ID NO: 36465 - RNA, 21 nt, Artificial Sequence
  RPE65 RNA guide
gcccauguggagcuuagaaug

SEQ ID NO: 36466 - RNA, 21 nt, Artificial Sequence
  RPE65 RNA guide
gcccugcuuggucaccccaag

SEQ ID NO: 36467 - RNA, 21 nt, Artificial Sequence
  RPE65 RNA guide
gcccugggggaaguucacaua

SEQ ID NO: 36468 - RNA, 21 nt, Artificial Sequence
  RPE65 RNA guide
gcucacuuucuuggggugacc

SEQ ID NO: 36469 - RNA, 21 nt, Artificial Sequence
  RPE65 RNA guide
gcuccacaugggcuguacgga

SEQ ID NO: 36470 - RNA, 21 nt, Artificial Sequence
  RPE65 RNA guide
gcuccugucuauacucuuccc

SEQ ID NO: 36471 - RNA, 21 nt, Artificial Sequence
  RPE65 RNA guide
gcucuggccaacuaggauucu

SEQ ID NO: 36472 - RNA, 21 nt, Artificial Sequence
  RPE65 RNA guide
gcugaauuauauucuucucaa

SEQ ID NO: 36473 - RNA, 21 nt, Artificial Sequence
  RPE65 RNA guide
gcugcauggugugauauagaa

SEQ ID NO: 36474 - RNA, 21 nt, Artificial Sequence
  RPE65 RNA guide
gcuggguuagaauccuaguug

SEQ ID NO: 36475 - RNA, 21 nt, Artificial Sequence
  RPE65 RNA guide
gcuguacggauugcuccuguc

SEQ ID NO: 36476 - RNA, 21 nt, Artificial Sequence
  RPE65 RNA guide
gcuuagaauggccauucuaug

SEQ ID NO: 36477 - RNA, 21 nt, Artificial Sequence
  RPE65 RNA guide
gcuuggccacauaugccaauc

SEQ ID NO: 36478 - RNA, 21 nt, Artificial Sequence
  RPE65 RNA guide
gcuuggucaccccaagaaagu

SEQ ID NO: 36479 - RNA, 21 nt, Artificial Sequence
  RPE65 RNA guide
ggaaaauuccggacauggugu

SEQ ID NO: 36480 - RNA, 21 nt, Artificial Sequence
  RPE65 RNA guide
ggaaauugagguucagaggag

SEQ ID NO: 36481 - RNA, 21 nt, Artificial Sequence
  RPE65 RNA guide
ggaagaguauagacaggagca

SEQ ID NO: 36482 - RNA, 21 nt, Artificial Sequence
  RPE65 RNA guide
ggaaguucacauaggaccccc

SEQ ID NO: 36483 - RNA, 21 nt, Artificial Sequence
  RPE65 RNA guide
ggaauuuucccaguaaguuua

SEQ ID NO: 36484 - RNA, 21 nt, Artificial Sequence
  RPE65 RNA guide
ggacaacaugaacuuucuaua

SEQ ID NO: 36485 - RNA, 21 nt, Artificial Sequence
  RPE65 RNA guide
ggacacauagaauggccauuc

SEQ ID NO: 36486 - RNA, 21 nt, Artificial Sequence
  RPE65 RNA guide
ggacauugaaacauagggaag

SEQ ID NO: 36487 - RNA, 21 nt, Artificial Sequence
  RPE65 RNA guide
ggacauugugucugcccugcu

SEQ ID NO: 36488 - RNA, 21 nt, Artificial Sequence
  RPE65 RNA guide
ggacccccacccccaucaccu

SEQ ID NO: 36489 - RNA, 21 nt, Artificial Sequence
  RPE65 RNA guide
ggagauugagaagaauauaau

SEQ ID NO: 36490 - RNA, 21 nt, Artificial Sequence
  RPE65 RNA guide
ggagcaauccguacagcccau

SEQ ID NO: 36491 - RNA, 21 nt, Artificial Sequence
  RPE65 RNA guide
ggagcuuagaauggccauucu

SEQ ID NO: 36492 - RNA, 21 nt, Artificial Sequence
  RPE65 RNA guide
ggaguuaagugauuggcauau

SEQ ID NO: 36493 - RNA, 21 nt, Artificial Sequence
  RPE65 RNA guide
ggauucuaacccagcuuggcc

SEQ ID NO: 36494 - RNA, 21 nt, Artificial Sequence
  RPE65 RNA guide
ggauugcuccugucuauacuc

SEQ ID NO: 36495 - RNA, 21 nt, Artificial Sequence
  RPE65 RNA guide
ggcagacacaaugucccuuga

SEQ ID NO: 36496 - RNA, 21 nt, Artificial Sequence
  RPE65 RNA guide
ggcauauguggccaagcuggg

SEQ ID NO: 36497 - RNA, 21 nt, Artificial Sequence
  RPE65 RNA guide
ggccaacuaggauucuaaccc

SEQ ID NO: 36498 - RNA, 21 nt, Artificial Sequence
  RPE65 RNA guide
ggccaagcuggguuagaaucc

SEQ ID NO: 36499 - RNA, 21 nt, Artificial Sequence
  RPE65 RNA guide
ggccacauaugccaaucacuu

SEQ ID NO: 36500 - RNA, 21 nt, Artificial Sequence
  RPE65 RNA guide
ggccagagcaggacaacauga

SEQ ID NO: 36501 - RNA, 21 nt, Artificial Sequence
  RPE65 RNA guide
ggccauucuaagcuccacaug

SEQ ID NO: 36502 - RNA, 21 nt, Artificial Sequence
  RPE65 RNA guide
ggccauucuauguguccucau

SEQ ID NO: 36503 - RNA, 21 nt, Artificial Sequence
  RPE65 RNA guide
ggcugcauggugugauauaga

SEQ ID NO: 36504 - RNA, 21 nt, Artificial Sequence
  RPE65 RNA guide
ggcuguacggauugcuccugu

SEQ ID NO: 36505 - RNA, 21 nt, Artificial Sequence
  RPE65 RNA guide
gggaaaauuccggacauggug

SEQ ID NO: 36506 - RNA, 21 nt, Artificial Sequence
  RPE65 RNA guide
gggaagaguauagacaggagc

SEQ ID NO: 36507 - RNA, 21 nt, Artificial Sequence
  RPE65 RNA guide
gggaaguucacauaggacccc

SEQ ID NO: 36508 - RNA, 21 nt, Artificial Sequence
  RPE65 RNA guide
gggacauugugucugcccugc

SEQ ID NO: 36509 - RNA, 21 nt, Artificial Sequence
  RPE65 RNA guide
gggcagacacaaugucccuug

SEQ ID NO: 36510 - RNA, 21 nt, Artificial Sequence
  RPE65 RNA guide
gggcugcauggugugauauag

SEQ ID NO: 36511 - RNA, 21 nt, Artificial Sequence
  RPE65 RNA guide
gggcuguacggauugcuccug

SEQ ID NO: 36512 - RNA, 21 nt, Artificial Sequence
  RPE65 RNA guide
ggggaaguucacauaggaccc

SEQ ID NO: 36513 - RNA, 21 nt, Artificial Sequence
  RPE65 RNA guide
gggggaaguucacauaggacc

SEQ ID NO: 36514 - RNA, 21 nt, Artificial Sequence
  RPE65 RNA guide
ggggguccuaugugaacuucc

SEQ ID NO: 36515 - RNA, 21 nt, Artificial Sequence
  RPE65 RNA guide
ggggguggggguccuauguga

SEQ ID NO: 36516 - RNA, 21 nt, Artificial Sequence
  RPE65 RNA guide
gggguccuaugugaacuuccc

SEQ ID NO: 36517 - RNA, 21 nt, Artificial Sequence
  RPE65 RNA guide
ggggugaccaagcagggcaga

SEQ ID NO: 36518 - RNA, 21 nt, Artificial Sequence
  RPE65 RNA guide
gggguggggguccuaugugaa

SEQ ID NO: 36519 - RNA, 21 nt, Artificial Sequence
  RPE65 RNA guide
ggguccuaugugaacuucccc

SEQ ID NO: 36520 - RNA, 21 nt, Artificial Sequence
  RPE65 RNA guide
gggugaccaagcagggcagac

SEQ ID NO: 36521 - RNA, 21 nt, Artificial Sequence
  RPE65 RNA guide
ggguggggguccuaugugaac

SEQ ID NO: 36522 - RNA, 21 nt, Artificial Sequence
  RPE65 RNA guide
ggguuagaauccuaguuggcc

SEQ ID NO: 36523 - RNA, 21 nt, Artificial Sequence
  RPE65 RNA guide
ggguuuuauuagcucacuuuc

SEQ ID NO: 36524 - RNA, 21 nt, Artificial Sequence
  RPE65 RNA guide
ggucaccccaagaaagugagc

SEQ ID NO: 36525 - RNA, 21 nt, Artificial Sequence
  RPE65 RNA guide
gguccuaugugaacuuccccc

SEQ ID NO: 36526 - RNA, 21 nt, Artificial Sequence
  RPE65 RNA guide
ggugaccaagcagggcagaca

SEQ ID NO: 36527 - RNA, 21 nt, Artificial Sequence
  RPE65 RNA guide
ggugauggggguggggguccu

SEQ ID NO: 36528 - RNA, 21 nt, Artificial Sequence
  RPE65 RNA guide
gguggggguccuaugugaacu

SEQ ID NO: 36529 - RNA, 21 nt, Artificial Sequence
  RPE65 RNA guide
ggugugauauagaaaguucau

SEQ ID NO: 36530 - RNA, 21 nt, Artificial Sequence
  RPE65 RNA guide
gguuagaauccuaguuggcca

SEQ ID NO: 36531 - RNA, 21 nt, Artificial Sequence
  RPE65 RNA guide
gguuauaggugaugggggugg

SEQ ID NO: 36532 - RNA, 21 nt, Artificial Sequence
  RPE65 RNA guide
gguucagaggaguuaagugau

SEQ ID NO: 36533 - RNA, 21 nt, Artificial Sequence
  RPE65 RNA guide
gguugauagguuauaggugau

SEQ ID NO: 36534 - RNA, 21 nt, Artificial Sequence
  RPE65 RNA guide
gguuuuauuagcucacuuucu

SEQ ID NO: 36535 - RNA, 21 nt, Artificial Sequence
  RPE65 RNA guide
guaaacucaagggacauugug

SEQ ID NO: 36536 - RNA, 21 nt, Artificial Sequence
  RPE65 RNA guide
guaaguuuagguugauagguu

SEQ ID NO: 36537 - RNA, 21 nt, Artificial Sequence
  RPE65 RNA guide
guacagcccauguggagcuua

SEQ ID NO: 36538 - RNA, 21 nt, Artificial Sequence
  RPE65 RNA guide
guacggauugcuccugucuau

SEQ ID NO: 36539 - RNA, 21 nt, Artificial Sequence
  RPE65 RNA guide
guauagacaggagcaauccgu

SEQ ID NO: 36540 - RNA, 21 nt, Artificial Sequence
  RPE65 RNA guide
gucacaaucauaaaugcacaa

SEQ ID NO: 36541 - RNA, 21 nt, Artificial Sequence
  RPE65 RNA guide
gucaccccaagaaagugagcu

SEQ ID NO: 36542 - RNA, 21 nt, Artificial Sequence
  RPE65 RNA guide
gucccuugaguuuacguuuuu

SEQ ID NO: 36543 - RNA, 21 nt, Artificial Sequence
  RPE65 RNA guide
guccggaauuuucccaguaag

SEQ ID NO: 36544 - RNA, 21 nt, Artificial Sequence
  RPE65 RNA guide
guccuaugugaacuuccccca

SEQ ID NO: 36545 - RNA, 21 nt, Artificial Sequence
  RPE65 RNA guide
guccucaucaagucacaauca

SEQ ID NO: 36546 - RNA, 21 nt, Artificial Sequence
  RPE65 RNA guide
guccugcucuggccaacuagg

SEQ ID NO: 36547 - RNA, 21 nt, Artificial Sequence
  RPE65 RNA guide
gucuauacucuucccuauguu

SEQ ID NO: 36548 - RNA, 21 nt, Artificial Sequence
  RPE65 RNA guide
gucugcccugcuuggucaccc

SEQ ID NO: 36549 - RNA, 21 nt, Artificial Sequence
  RPE65 RNA guide
gugaacuucccccagggcugc

SEQ ID NO: 36550 - RNA, 21 nt, Artificial Sequence
  RPE65 RNA guide
gugaccaagcagggcagacac

SEQ ID NO: 36551 - RNA, 21 nt, Artificial Sequence
  RPE65 RNA guide
gugacuugaugaggacacaua

SEQ ID NO: 36552 - RNA, 21 nt, Artificial Sequence
  RPE65 RNA guide
gugagcuaauaaaacccuuua

SEQ ID NO: 36553 - RNA, 21 nt, Artificial Sequence
  RPE65 RNA guide
gugauauagaaaguucauguu

SEQ ID NO: 36554 - RNA, 21 nt, Artificial Sequence
  RPE65 RNA guide
gugauggggguggggguccua

SEQ ID NO: 36555 - RNA, 21 nt, Artificial Sequence
  RPE65 RNA guide
gugauuggcauauguggccaa

SEQ ID NO: 36556 - RNA, 21 nt, Artificial Sequence
  RPE65 RNA guide
gugcauuuaugauugugacuu

SEQ ID NO: 36557 - RNA, 21 nt, Artificial Sequence
  RPE65 RNA guide
guggagcuuagaauggccauu

SEQ ID NO: 36558 - RNA, 21 nt, Artificial Sequence
  RPE65 RNA guide
guggccaagcuggguuagaau

SEQ ID NO: 36559 - RNA, 21 nt, Artificial Sequence
  RPE65 RNA guide
guggggguccuaugugaacuu

SEQ ID NO: 36560 - RNA, 21 nt, Artificial Sequence
  RPE65 RNA guide
guguccucaucaagucacaau

SEQ ID NO: 36561 - RNA, 21 nt, Artificial Sequence
  RPE65 RNA guide
gugucugcccugcuuggucac

SEQ ID NO: 36562 - RNA, 21 nt, Artificial Sequence
  RPE65 RNA guide
gugugauauagaaaguucaug

SEQ ID NO: 36563 - RNA, 21 nt, Artificial Sequence
  RPE65 RNA guide
guuaagugauuggcauaugug

SEQ ID NO: 36564 - RNA, 21 nt, Artificial Sequence
  RPE65 RNA guide
guuagaauccuaguuggccag

SEQ ID NO: 36565 - RNA, 21 nt, Artificial Sequence
  RPE65 RNA guide
guuauaggugauggggguggg

SEQ ID NO: 36566 - RNA, 21 nt, Artificial Sequence
  RPE65 RNA guide
guucacauaggacccccaccc

SEQ ID NO: 36567 - RNA, 21 nt, Artificial Sequence
  RPE65 RNA guide
guucagaggaguuaagugauu

SEQ ID NO: 36568 - RNA, 21 nt, Artificial Sequence
  RPE65 RNA guide
guucauguuguccugcucugg

SEQ ID NO: 36569 - RNA, 21 nt, Artificial Sequence
  RPE65 RNA guide
guugauagguuauaggugaug

SEQ ID NO: 36570 - RNA, 21 nt, Artificial Sequence
  RPE65 RNA guide
guuggccagagcaggacaaca

SEQ ID NO: 36571 - RNA, 21 nt, Artificial Sequence
  RPE65 RNA guide
guuguccugcucuggccaacu

SEQ ID NO: 36572 - RNA, 21 nt, Artificial Sequence
  RPE65 RNA guide
guugugcauuuaugauuguga

SEQ ID NO: 36573 - RNA, 21 nt, Artificial Sequence
  RPE65 RNA guide
guuuagguugauagguuauag

SEQ ID NO: 36574 - RNA, 21 nt, Artificial Sequence
  RPE65 RNA guide
guuuuauuagcucacuuucuu

SEQ ID NO: 36575 - RNA, 21 nt, Artificial Sequence
  RPE65 RNA guide
uaaaaacguaaacucaaggga

SEQ ID NO: 36576 - RNA, 21 nt, Artificial Sequence
  RPE65 RNA guide
uaaaaguaacagagggagauu

SEQ ID NO: 36577 - RNA, 21 nt, Artificial Sequence
  RPE65 RNA guide
uaaaccucacagaugaggaaa

SEQ ID NO: 36578 - RNA, 21 nt, Artificial Sequence
  RPE65 RNA guide
uaaacucaagggacauugugu

SEQ ID NO: 36579 - RNA, 21 nt, Artificial Sequence
  RPE65 RNA guide
uaaacuuacugggaaaauucc

SEQ ID NO: 36580 - RNA, 21 nt, Artificial Sequence
  RPE65 RNA guide
uaaaggguuuuauuagcucac

SEQ ID NO: 36581 - RNA, 21 nt, Artificial Sequence
  RPE65 RNA guide
uaacccagcuuggccacauau

SEQ ID NO: 36582 - RNA, 21 nt, Artificial Sequence
  RPE65 RNA guide
uaaccuaucaaccuaaacuua

SEQ ID NO: 36583 - RNA, 21 nt, Artificial Sequence
  RPE65 RNA guide
uaacuccucugaaccucaauu

SEQ ID NO: 36584 - RNA, 21 nt, Artificial Sequence
  RPE65 RNA guide
uaagcuccacaugggcuguac

SEQ ID NO: 36585 - RNA, 21 nt, Artificial Sequence
  RPE65 RNA guide
uaagugauuggcauauguggc

SEQ ID NO: 36586 - RNA, 21 nt, Artificial Sequence
  RPE65 RNA guide
uaaguuuagguugauagguua

SEQ ID NO: 36587 - RNA, 21 nt, Artificial Sequence
  RPE65 RNA guide
uaauucagcacaccauguccg

SEQ ID NO: 36588 - RNA, 21 nt, Artificial Sequence
  RPE65 RNA guide
uacagcccauguggagcuuag

SEQ ID NO: 36589 - RNA, 21 nt, Artificial Sequence
  RPE65 RNA guide
uacggauugcuccugucuaua

SEQ ID NO: 36590 - RNA, 21 nt, Artificial Sequence
  RPE65 RNA guide
uacucuucccuauguuucaau

SEQ ID NO: 36591 - RNA, 21 nt, Artificial Sequence
  RPE65 RNA guide
uacugggaaaauuccggacau

SEQ ID NO: 36592 - RNA, 21 nt, Artificial Sequence
  RPE65 RNA guide
uagaaaguucauguuguccug

SEQ ID NO: 36593 - RNA, 21 nt, Artificial Sequence
  RPE65 RNA guide
uagaauccuaguuggccagag

SEQ ID NO: 36594 - RNA, 21 nt, Artificial Sequence
  RPE65 RNA guide
uagaauggccauucuaagcuc

SEQ ID NO: 36595 - RNA, 21 nt, Artificial Sequence
  RPE65 RNA guide
uagaauggccauucuaugugu

SEQ ID NO: 36596 - RNA, 21 nt, Artificial Sequence
  RPE65 RNA guide
uagacaggagcaauccguaca

SEQ ID NO: 36597 - RNA, 21 nt, Artificial Sequence
  RPE65 RNA guide
uagcucacuuucuugggguga

SEQ ID NO: 36598 - RNA, 21 nt, Artificial Sequence
  RPE65 RNA guide
uaggacccccacccccaucac

SEQ ID NO: 36599 - RNA, 21 nt, Artificial Sequence
  RPE65 RNA guide
uaggauucuaacccagcuugg

SEQ ID NO: 36600 - RNA, 21 nt, Artificial Sequence
  RPE65 RNA guide
uagggaagaguauagacagga

SEQ ID NO: 36601 - RNA, 21 nt, Artificial Sequence
  RPE65 RNA guide
uaggugauggggguggggguc

SEQ ID NO: 36602 - RNA, 21 nt, Artificial Sequence
  RPE65 RNA guide
uagguuauaggugaugggggu

SEQ ID NO: 36603 - RNA, 21 nt, Artificial Sequence
  RPE65 RNA guide
uagguugauagguuauaggug

SEQ ID NO: 36604 - RNA, 21 nt, Artificial Sequence
  RPE65 RNA guide
uaguuggccagagcaggacaa

SEQ ID NO: 36605 - RNA, 21 nt, Artificial Sequence
  RPE65 RNA guide
uauaauucagcacaccauguc

SEQ ID NO: 36606 - RNA, 21 nt, Artificial Sequence
  RPE65 RNA guide
uauacucuucccuauguuuca

SEQ ID NO: 36607 - RNA, 21 nt, Artificial Sequence
  RPE65 RNA guide
uauagaaaguucauguugucc

SEQ ID NO: 36608 - RNA, 21 nt, Artificial Sequence
  RPE65 RNA guide
uauagacaggagcaauccgua

SEQ ID NO: 36609 - RNA, 21 nt, Artificial Sequence
  RPE65 RNA guide
uauaggugauggggguggggg

SEQ ID NO: 36610 - RNA, 21 nt, Artificial Sequence
  RPE65 RNA guide
uauaucacaccaugcagcccu

SEQ ID NO: 36611 - RNA, 21 nt, Artificial Sequence
  RPE65 RNA guide
uaucaaccuaaacuuacuggg

SEQ ID NO: 36612 - RNA, 21 nt, Artificial Sequence
  RPE65 RNA guide
uaucacaccaugcagcccugg

SEQ ID NO: 36613 - RNA, 21 nt, Artificial Sequence
  RPE65 RNA guide
uaucuuuuaaaccucacagau

SEQ ID NO: 36614 - RNA, 21 nt, Artificial Sequence
  RPE65 RNA guide
uaugauugugacuugaugagg

SEQ ID NO: 36615 - RNA, 21 nt, Artificial Sequence
  RPE65 RNA guide
uaugccaaucacuuaacuccu

SEQ ID NO: 36616 - RNA, 21 nt, Artificial Sequence
  RPE65 RNA guide
uaugugaacuucccccagggc

SEQ ID NO: 36617 - RNA, 21 nt, Artificial Sequence
  RPE65 RNA guide
uauguggccaagcuggguuag

SEQ ID NO: 36618 - RNA, 21 nt, Artificial Sequence
  RPE65 RNA guide
uauguguccucaucaagucac

SEQ ID NO: 36619 - RNA, 21 nt, Artificial Sequence
  RPE65 RNA guide
uauuagcucacuuucuugggg

SEQ ID NO: 36620 - RNA, 21 nt, Artificial Sequence
  RPE65 RNA guide
ucaaccuaaacuuacugggaa

SEQ ID NO: 36621 - RNA, 21 nt, Artificial Sequence
  RPE65 RNA guide
ucaagggacauugugucugcc

SEQ ID NO: 36622 - RNA, 21 nt, Artificial Sequence
  RPE65 RNA guide
ucaagucacaaucauaaaugc

SEQ ID NO: 36623 - RNA, 21 nt, Artificial Sequence
  RPE65 RNA guide
ucaaucucccucuguuacuuu

SEQ ID NO: 36624 - RNA, 21 nt, Artificial Sequence
  RPE65 RNA guide
ucaauuuccucaucugugagg

SEQ ID NO: 36625 - RNA, 21 nt, Artificial Sequence
  RPE65 RNA guide
ucacaaucauaaaugcacaac

SEQ ID NO: 36626 - RNA, 21 nt, Artificial Sequence
  RPE65 RNA guide
ucacaccaugcagcccugggg

SEQ ID NO: 36627 - RNA, 21 nt, Artificial Sequence
  RPE65 RNA guide
ucacauaggacccccaccccc

SEQ ID NO: 36628 - RNA, 21 nt, Artificial Sequence
  RPE65 RNA guide
ucaccccaagaaagugagcua

SEQ ID NO: 36629 - RNA, 21 nt, Artificial Sequence
  RPE65 RNA guide
ucaccuauaaccuaucaaccu

SEQ ID NO: 36630 - RNA, 21 nt, Artificial Sequence
  RPE65 RNA guide
ucacuuaacuccucugaaccu

SEQ ID NO: 36631 - RNA, 21 nt, Artificial Sequence
  RPE65 RNA guide
ucacuuucuuggggugaccaa

SEQ ID NO: 36632 - RNA, 21 nt, Artificial Sequence
  RPE65 RNA guide
ucagaggaguuaagugauugg

SEQ ID NO: 36633 - RNA, 21 nt, Artificial Sequence
  RPE65 RNA guide
ucagcacaccauguccggaau

SEQ ID NO: 36634 - RNA, 21 nt, Artificial Sequence
  RPE65 RNA guide
ucaucaagucacaaucauaaa

SEQ ID NO: 36635 - RNA, 21 nt, Artificial Sequence
  RPE65 RNA guide
ucauguuguccugcucuggcc

SEQ ID NO: 36636 - RNA, 21 nt, Artificial Sequence
  RPE65 RNA guide
ucauguugugcauuuaugauu

SEQ ID NO: 36637 - RNA, 21 nt, Artificial Sequence
  RPE65 RNA guide
uccacaugggcuguacggauu

SEQ ID NO: 36638 - RNA, 21 nt, Artificial Sequence
  RPE65 RNA guide
ucccaguaaguuuagguugau

SEQ ID NO: 36639 - RNA, 21 nt, Artificial Sequence
  RPE65 RNA guide
ucccccagggcugcauggugu

SEQ ID NO: 36640 - RNA, 21 nt, Artificial Sequence
  RPE65 RNA guide
ucccucuguuacuuuuauguu

SEQ ID NO: 36641 - RNA, 21 nt, Artificial Sequence
  RPE65 RNA guide
ucccuugaguuuacguuuuua

SEQ ID NO: 36642 - RNA, 21 nt, Artificial Sequence
  RPE65 RNA guide
uccggaauuuucccaguaagu

SEQ ID NO: 36643 - RNA, 21 nt, Artificial Sequence
  RPE65 RNA guide
uccggacauggugugcugaau

SEQ ID NO: 36644 - RNA, 21 nt, Artificial Sequence
  RPE65 RNA guide
uccguacagcccauguggagc

SEQ ID NO: 36645 - RNA, 21 nt, Artificial Sequence
  RPE65 RNA guide
uccuaguuggccagagcagga

SEQ ID NO: 36646 - RNA, 21 nt, Artificial Sequence
  RPE65 RNA guide
uccuaugugaacuucccccag

SEQ ID NO: 36647 - RNA, 21 nt, Artificial Sequence
  RPE65 RNA guide
uccucaucaagucacaaucau

SEQ ID NO: 36648 - RNA, 21 nt, Artificial Sequence
  RPE65 RNA guide
uccucaucugugagguuuaaa

SEQ ID NO: 36649 - RNA, 21 nt, Artificial Sequence
  RPE65 RNA guide
uccugcucuggccaacuagga

SEQ ID NO: 36650 - RNA, 21 nt, Artificial Sequence
  RPE65 RNA guide
uccugucuauacucuucccua

SEQ ID NO: 36651 - RNA, 21 nt, Artificial Sequence
  RPE65 RNA guide
ucuaacccagcuuggccacau

SEQ ID NO: 36652 - RNA, 21 nt, Artificial Sequence
  RPE65 RNA guide
ucuaagcuccacaugggcugu

SEQ ID NO: 36653 - RNA, 21 nt, Artificial Sequence
  RPE65 RNA guide
ucuauacucuucccuauguuu

SEQ ID NO: 36654 - RNA, 21 nt, Artificial Sequence
  RPE65 RNA guide
ucuauaucacaccaugcagcc

SEQ ID NO: 36655 - RNA, 21 nt, Artificial Sequence
  RPE65 RNA guide
ucuauguguccucaucaaguc

SEQ ID NO: 36656 - RNA, 21 nt, Artificial Sequence
  RPE65 RNA guide
ucucaaucucccucuguuacu

SEQ ID NO: 36657 - RNA, 21 nt, Artificial Sequence
  RPE65 RNA guide
ucucccucuguuacuuuuaug

SEQ ID NO: 36658 - RNA, 21 nt, Artificial Sequence
  RPE65 RNA guide
ucugcccugcuuggucacccc

SEQ ID NO: 36659 - RNA, 21 nt, Artificial Sequence
  RPE65 RNA guide
ucuggccaacuaggauucuaa

SEQ ID NO: 36660 - RNA, 21 nt, Artificial Sequence
  RPE65 RNA guide
ucuucauguugugcauuuaug

SEQ ID NO: 36661 - RNA, 21 nt, Artificial Sequence
  RPE65 RNA guide
ucuucccuauguuucaauguc

SEQ ID NO: 36662 - RNA, 21 nt, Artificial Sequence
  RPE65 RNA guide
ucuuggggugaccaagcaggg

SEQ ID NO: 36663 - RNA, 21 nt, Artificial Sequence
  RPE65 RNA guide
ucuuuuaaaccucacagauga

SEQ ID NO: 36664 - RNA, 21 nt, Artificial Sequence
  RPE65 RNA guide
ugaaacauagggaagaguaua

SEQ ID NO: 36665 - RNA, 21 nt, Artificial Sequence
  RPE65 RNA guide
ugaacuucccccagggcugca

SEQ ID NO: 36666 - RNA, 21 nt, Artificial Sequence
  RPE65 RNA guide
ugaacuuucuauaucacacca

SEQ ID NO: 36667 - RNA, 21 nt, Artificial Sequence
  RPE65 RNA guide
ugaaggacauugaaacauagg

SEQ ID NO: 36668 - RNA, 21 nt, Artificial Sequence
  RPE65 RNA guide
ugaauuauauucuucucaauc

SEQ ID NO: 36669 - RNA, 21 nt, Artificial Sequence
  RPE65 RNA guide
ugaccaagcagggcagacaca

SEQ ID NO: 36670 - RNA, 21 nt, Artificial Sequence
  RPE65 RNA guide
ugacuugaugaggacacauag

SEQ ID NO: 36671 - RNA, 21 nt, Artificial Sequence
  RPE65 RNA guide
ugagaagaauauaauucagca

SEQ ID NO: 36672 - RNA, 21 nt, Artificial Sequence
  RPE65 RNA guide
ugaggaaauugagguucagag

SEQ ID NO: 36673 - RNA, 21 nt, Artificial Sequence
  RPE65 RNA guide
ugaggacacauagaauggcca

SEQ ID NO: 36674 - RNA, 21 nt, Artificial Sequence
  RPE65 RNA guide
ugagguucagaggaguuaagu

SEQ ID NO: 36675 - RNA, 21 nt, Artificial Sequence
  RPE65 RNA guide
ugauagguuauaggugauggg

SEQ ID NO: 36676 - RNA, 21 nt, Artificial Sequence
  RPE65 RNA guide
ugauauagaaaguucauguug

SEQ ID NO: 36677 - RNA, 21 nt, Artificial Sequence
  RPE65 RNA guide
ugaugaggacacauagaaugg

SEQ ID NO: 36678 - RNA, 21 nt, Artificial Sequence
  RPE65 RNA guide
ugauggggguggggguccuau

SEQ ID NO: 36679 - RNA, 21 nt, Artificial Sequence
  RPE65 RNA guide
ugauuggcauauguggccaag

SEQ ID NO: 36680 - RNA, 21 nt, Artificial Sequence
  RPE65 RNA guide
ugauugugacuugaugaggac

SEQ ID NO: 36681 - RNA, 21 nt, Artificial Sequence
  RPE65 RNA guide
ugcacaacaugaagaauaaag

SEQ ID NO: 36682 - RNA, 21 nt, Artificial Sequence
  RPE65 RNA guide
ugcagcccugggggaaguuca

SEQ ID NO: 36683 - RNA, 21 nt, Artificial Sequence
  RPE65 RNA guide
ugcauggugugauauagaaag

SEQ ID NO: 36684 - RNA, 21 nt, Artificial Sequence
  RPE65 RNA guide
ugcauuuaugauugugacuug

SEQ ID NO: 36685 - RNA, 21 nt, Artificial Sequence
  RPE65 RNA guide
ugccaaucacuuaacuccucu

SEQ ID NO: 36686 - RNA, 21 nt, Artificial Sequence
  RPE65 RNA guide
ugcccugcuuggucaccccaa

SEQ ID NO: 36687 - RNA, 21 nt, Artificial Sequence
  RPE65 RNA guide
ugcuccugucuauacucuucc

SEQ ID NO: 36688 - RNA, 21 nt, Artificial Sequence
  RPE65 RNA guide
ugcucuggccaacuaggauuc

SEQ ID NO: 36689 - RNA, 21 nt, Artificial Sequence
  RPE65 RNA guide
ugcuuggucaccccaagaaag

SEQ ID NO: 36690 - RNA, 21 nt, Artificial Sequence
  RPE65 RNA guide
uggagcuuagaauggccauuc

SEQ ID NO: 36691 - RNA, 21 nt, Artificial Sequence
  RPE65 RNA guide
uggcauauguggccaagcugg

SEQ ID NO: 36692 - RNA, 21 nt, Artificial Sequence
  RPE65 RNA guide
uggccaacuaggauucuaacc

SEQ ID NO: 36693 - RNA, 21 nt, Artificial Sequence
  RPE65 RNA guide
uggccaagcuggguuagaauc

SEQ ID NO: 36694 - RNA, 21 nt, Artificial Sequence
  RPE65 RNA guide
uggccacauaugccaaucacu

SEQ ID NO: 36695 - RNA, 21 nt, Artificial Sequence
  RPE65 RNA guide
uggccagagcaggacaacaug

SEQ ID NO: 36696 - RNA, 21 nt, Artificial Sequence
  RPE65 RNA guide
uggccauucuaagcuccacau

SEQ ID NO: 36697 - RNA, 21 nt, Artificial Sequence
  RPE65 RNA guide
uggccauucuauguguccuca

SEQ ID NO: 36698 - RNA, 21 nt, Artificial Sequence
  RPE65 RNA guide
ugggaaaauuccggacauggu

SEQ ID NO: 36699 - RNA, 21 nt, Artificial Sequence
  RPE65 RNA guide
ugggcuguacggauugcuccu

SEQ ID NO: 36700 - RNA, 21 nt, Artificial Sequence
  RPE65 RNA guide
ugggggaaguucacauaggac

SEQ ID NO: 36701 - RNA, 21 nt, Artificial Sequence
  RPE65 RNA guide
uggggguccuaugugaacuuc

SEQ ID NO: 36702 - RNA, 21 nt, Artificial Sequence
  RPE65 RNA guide
uggggguggggguccuaugug

SEQ ID NO: 36703 - RNA, 21 nt, Artificial Sequence
  RPE65 RNA guide
uggggugaccaagcagggcag

SEQ ID NO: 36704 - RNA, 21 nt, Artificial Sequence
  RPE65 RNA guide
uggguuagaauccuaguuggc

SEQ ID NO: 36705 - RNA, 21 nt, Artificial Sequence
  RPE65 RNA guide
uggucaccccaagaaagugag

SEQ ID NO: 36706 - RNA, 21 nt, Artificial Sequence
  RPE65 RNA guide
uggugugauauagaaaguuca

SEQ ID NO: 36707 - RNA, 21 nt, Artificial Sequence
  RPE65 RNA guide
uguacggauugcuccugucua

SEQ ID NO: 36708 - RNA, 21 nt, Artificial Sequence
  RPE65 RNA guide
ugucccuugaguuuacguuuu

SEQ ID NO: 36709 - RNA, 21 nt, Artificial Sequence
  RPE65 RNA guide
uguccggaauuuucccaguaa

SEQ ID NO: 36710 - RNA, 21 nt, Artificial Sequence
  RPE65 RNA guide
uguccucaucaagucacaauc

SEQ ID NO: 36711 - RNA, 21 nt, Artificial Sequence
  RPE65 RNA guide
uguccugcucuggccaacuag

SEQ ID NO: 36712 - RNA, 21 nt, Artificial Sequence
  RPE65 RNA guide
ugucuauacucuucccuaugu

SEQ ID NO: 36713 - RNA, 21 nt, Artificial Sequence
  RPE65 RNA guide
ugucugcccugcuuggucacc

SEQ ID NO: 36714 - RNA, 21 nt, Artificial Sequence
  RPE65 RNA guide
ugugaacuucccccagggcug

SEQ ID NO: 36715 - RNA, 21 nt, Artificial Sequence
  RPE65 RNA guide
ugugacuugaugaggacacau

SEQ ID NO: 36716 - RNA, 21 nt, Artificial Sequence
  RPE65 RNA guide
ugugauauagaaaguucaugu

SEQ ID NO: 36717 - RNA, 21 nt, Artificial Sequence
  RPE65 RNA guide
ugugcauuuaugauugugacu

SEQ ID NO: 36718 - RNA, 21 nt, Artificial Sequence
  RPE65 RNA guide
uguggagcuuagaauggccau

SEQ ID NO: 36719 - RNA, 21 nt, Artificial Sequence
  RPE65 RNA guide
uguggccaagcuggguuagaa

SEQ ID NO: 36720 - RNA, 21 nt, Artificial Sequence
  RPE65 RNA guide
uguguccucaucaagucacaa

SEQ ID NO: 36721 - RNA, 21 nt, Artificial Sequence
  RPE65 RNA guide
ugugucugcccugcuugguca

SEQ ID NO: 36722 - RNA, 21 nt, Artificial Sequence
  RPE65 RNA guide
uguuguccugcucuggccaac

SEQ ID NO: 36723 - RNA, 21 nt, Artificial Sequence
  RPE65 RNA guide
uguugugcauuuaugauugug

SEQ ID NO: 36724 - RNA, 21 nt, Artificial Sequence
  RPE65 RNA guide
uuaaaccucacagaugaggaa

SEQ ID NO: 36725 - RNA, 21 nt, Artificial Sequence
  RPE65 RNA guide
uuaacuccucugaaccucaau

SEQ ID NO: 36726 - RNA, 21 nt, Artificial Sequence
  RPE65 RNA guide
uuaagugauuggcauaugugg

SEQ ID NO: 36727 - RNA, 21 nt, Artificial Sequence
  RPE65 RNA guide
uuacugggaaaauuccggaca

SEQ ID NO: 36728 - RNA, 21 nt, Artificial Sequence
  RPE65 RNA guide
uuagaauccuaguuggccaga

SEQ ID NO: 36729 - RNA, 21 nt, Artificial Sequence
  RPE65 RNA guide
uuagaauggccauucuaugug

SEQ ID NO: 36730 - RNA, 21 nt, Artificial Sequence
  RPE65 RNA guide
uuagcucacuuucuuggggug

SEQ ID NO: 36731 - RNA, 21 nt, Artificial Sequence
  RPE65 RNA guide
uuagguugauagguuauaggu

SEQ ID NO: 36732 - RNA, 21 nt, Artificial Sequence
  RPE65 RNA guide
uuauaggugaugggggugggg

SEQ ID NO: 36733 - RNA, 21 nt, Artificial Sequence
  RPE65 RNA guide
uuaucuuuuaaaccucacaga

SEQ ID NO: 36734 - RNA, 21 nt, Artificial Sequence
  RPE65 RNA guide
uuaugauugugacuugaugag

SEQ ID NO: 36735 - RNA, 21 nt, Artificial Sequence
  RPE65 RNA guide
uuauuagcucacuuucuuggg

SEQ ID NO: 36736 - RNA, 21 nt, Artificial Sequence
  RPE65 RNA guide
uucacauaggacccccacccc

SEQ ID NO: 36737 - RNA, 21 nt, Artificial Sequence
  RPE65 RNA guide
uucagaggaguuaagugauug

SEQ ID NO: 36738 - RNA, 21 nt, Artificial Sequence
  RPE65 RNA guide
uucagcacaccauguccggaa

SEQ ID NO: 36739 - RNA, 21 nt, Artificial Sequence
  RPE65 RNA guide
uucauguuguccugcucuggc

SEQ ID NO: 36740 - RNA, 21 nt, Artificial Sequence
  RPE65 RNA guide
uucauguugugcauuuaugau

SEQ ID NO: 36741 - RNA, 21 nt, Artificial Sequence
  RPE65 RNA guide
uucccaguaaguuuagguuga

SEQ ID NO: 36742 - RNA, 21 nt, Artificial Sequence
  RPE65 RNA guide
uucccccagggcugcauggug

SEQ ID NO: 36743 - RNA, 21 nt, Artificial Sequence
  RPE65 RNA guide
uucccuauguuucaauguccu

SEQ ID NO: 36744 - RNA, 21 nt, Artificial Sequence
  RPE65 RNA guide
uuccggacauggugugcugaa

SEQ ID NO: 36745 - RNA, 21 nt, Artificial Sequence
  RPE65 RNA guide
uuccucaucugugagguuuaa

SEQ ID NO: 36746 - RNA, 21 nt, Artificial Sequence
  RPE65 RNA guide
uucuaacccagcuuggccaca

SEQ ID NO: 36747 - RNA, 21 nt, Artificial Sequence
  RPE65 RNA guide
uucuaagcuccacaugggcug

SEQ ID NO: 36748 - RNA, 21 nt, Artificial Sequence
  RPE65 RNA guide
uucuauaucacaccaugcagc

SEQ ID NO: 36749 - RNA, 21 nt, Artificial Sequence
  RPE65 RNA guide
uucuauguguccucaucaagu

SEQ ID NO: 36750 - RNA, 21 nt, Artificial Sequence
  RPE65 RNA guide
uucucaaucucccucuguuac

SEQ ID NO: 36751 - RNA, 21 nt, Artificial Sequence
  RPE65 RNA guide
uucuuggggugaccaagcagg

SEQ ID NO: 36752 - RNA, 21 nt, Artificial Sequence
  RPE65 RNA guide
uugaaacauagggaagaguau

SEQ ID NO: 36753 - RNA, 21 nt, Artificial Sequence
  RPE65 RNA guide
uugagaagaauauaauucagc

SEQ ID NO: 36754 - RNA, 21 nt, Artificial Sequence
  RPE65 RNA guide
uugagguucagaggaguuaag

SEQ ID NO: 36755 - RNA, 21 nt, Artificial Sequence
  RPE65 RNA guide
uugauagguuauaggugaugg

SEQ ID NO: 36756 - RNA, 21 nt, Artificial Sequence
  RPE65 RNA guide
uugaugaggacacauagaaug

SEQ ID NO: 36757 - RNA, 21 nt, Artificial Sequence
  RPE65 RNA guide
uugcuccugucuauacucuuc

SEQ ID NO: 36758 - RNA, 21 nt, Artificial Sequence
  RPE65 RNA guide
uuggcauauguggccaagcug

SEQ ID NO: 36759 - RNA, 21 nt, Artificial Sequence
  RPE65 RNA guide
uuggccacauaugccaaucac

SEQ ID NO: 36760 - RNA, 21 nt, Artificial Sequence
  RPE65 RNA guide
uuggccagagcaggacaacau

SEQ ID NO: 36761 - RNA, 21 nt, Artificial Sequence
  RPE65 RNA guide
uuggggugaccaagcagggca

SEQ ID NO: 36762 - RNA, 21 nt, Artificial Sequence
  RPE65 RNA guide
uuggucaccccaagaaaguga

SEQ ID NO: 36763 - RNA, 21 nt, Artificial Sequence
  RPE65 RNA guide
uuguccugcucuggccaacua

SEQ ID NO: 36764 - RNA, 21 nt, Artificial Sequence
  RPE65 RNA guide
uugugacuugaugaggacaca

SEQ ID NO: 36765 - RNA, 21 nt, Artificial Sequence
  RPE65 RNA guide
uugugcauuuaugauugugac

SEQ ID NO: 36766 - RNA, 21 nt, Artificial Sequence
  RPE65 RNA guide
uugugucugcccugcuugguc

SEQ ID NO: 36767 - RNA, 21 nt, Artificial Sequence
  RPE65 RNA guide
uuuaaaccucacagaugagga

SEQ ID NO: 36768 - RNA, 21 nt, Artificial Sequence
  RPE65 RNA guide
uuuagguugauagguuauagg

SEQ ID NO: 36769 - RNA, 21 nt, Artificial Sequence
  RPE65 RNA guide
uuuaugauugugacuugauga

SEQ ID NO: 36770 - RNA, 21 nt, Artificial Sequence
  RPE65 RNA guide
uuuauuagcucacuuucuugg

SEQ ID NO: 36771 - RNA, 21 nt, Artificial Sequence
  RPE65 RNA guide
uuucccaguaaguuuagguug

SEQ ID NO: 36772 - RNA, 21 nt, Artificial Sequence
  RPE65 RNA guide
uuuccucaucugugagguuua

SEQ ID NO: 36773 - RNA, 21 nt, Artificial Sequence
  RPE65 RNA guide
uuucuauaucacaccaugcag

SEQ ID NO: 36774 - RNA, 21 nt, Artificial Sequence
  RPE65 RNA guide
uuucuuggggugaccaagcag

SEQ ID NO: 36775 - RNA, 21 nt, Artificial Sequence
  RPE65 RNA guide
uuuuaaaccucacagaugagg

SEQ ID NO: 36776 - RNA, 21 nt, Artificial Sequence
  RPE65 RNA guide
uuuuauuagcucacuuucuug

SEQ ID NO: 36777 - RNA, 21 nt, Artificial Sequence
  RPE65 RNA guide
uuuucccaguaaguuuagguu

SEQ ID NO: 36778 - RNA, 22 nt, Artificial Sequence
  RPE65 RNA guide
aaaaacauaaaaguaacagagg

SEQ ID NO: 36779 - RNA, 22 nt, Artificial Sequence
  RPE65 RNA guide
aaaaacguaaacucaagggaca

SEQ ID NO: 36780 - RNA, 22 nt, Artificial Sequence
  RPE65 RNA guide
aaaacauaaaaguaacagaggg

SEQ ID NO: 36781 - RNA, 22 nt, Artificial Sequence
  RPE65 RNA guide
aaaacccuuuauucuucauguu

SEQ ID NO: 36782 - RNA, 22 nt, Artificial Sequence
  RPE65 RNA guide
aaaacguaaacucaagggacau

SEQ ID NO: 36783 - RNA, 22 nt, Artificial Sequence
  RPE65 RNA guide
aaaagauaaaaacguaaacuca

SEQ ID NO: 36784 - RNA, 22 nt, Artificial Sequence
  RPE65 RNA guide
aaaauuccggacauggugugcu

SEQ ID NO: 36785 - RNA, 22 nt, Artificial Sequence
  RPE65 RNA guide
aaacauaaaaguaacagaggga

SEQ ID NO: 36786 - RNA, 22 nt, Artificial Sequence
  RPE65 RNA guide
aaacauagggaagaguauagac

SEQ ID NO: 36787 - RNA, 22 nt, Artificial Sequence
  RPE65 RNA guide
aaacccuuuauucuucauguug

SEQ ID NO: 36788 - RNA, 22 nt, Artificial Sequence
  RPE65 RNA guide
aaaccucacagaugaggaaauu

SEQ ID NO: 36789 - RNA, 22 nt, Artificial Sequence
  RPE65 RNA guide
aaacguaaacucaagggacauu

SEQ ID NO: 36790 - RNA, 22 nt, Artificial Sequence
  RPE65 RNA guide
aaacucaagggacauugugucu

SEQ ID NO: 36791 - RNA, 22 nt, Artificial Sequence
  RPE65 RNA guide
aaacuuacugggaaaauuccgg

SEQ ID NO: 36792 - RNA, 22 nt, Artificial Sequence
  RPE65 RNA guide
aaagauaaaaacguaaacucaa

SEQ ID NO: 36793 - RNA, 22 nt, Artificial Sequence
  RPE65 RNA guide
aaaggguuuuauuagcucacuu

SEQ ID NO: 36794 - RNA, 22 nt, Artificial Sequence
  RPE65 RNA guide
aaaguucauguuguccugcucu

SEQ ID NO: 36795 - RNA, 22 nt, Artificial Sequence
  RPE65 RNA guide
aaaugcacaacaugaagaauaa

SEQ ID NO: 36796 - RNA, 22 nt, Artificial Sequence
  RPE65 RNA guide
aaauuccggacauggugugcug

SEQ ID NO: 36797 - RNA, 22 nt, Artificial Sequence
  RPE65 RNA guide
aaauugagguucagaggaguua

SEQ ID NO: 36798 - RNA, 22 nt, Artificial Sequence
  RPE65 RNA guide
aacauaaaaguaacagagggag

SEQ ID NO: 36799 - RNA, 22 nt, Artificial Sequence
  RPE65 RNA guide
aacauagggaagaguauagaca

SEQ ID NO: 36800 - RNA, 22 nt, Artificial Sequence
  RPE65 RNA guide
aacaugaacuuucuauaucaca

SEQ ID NO: 36801 - RNA, 22 nt, Artificial Sequence
  RPE65 RNA guide
aacccagcuuggccacauaugc

SEQ ID NO: 36802 - RNA, 22 nt, Artificial Sequence
  RPE65 RNA guide
aacccuuuauucuucauguugu

SEQ ID NO: 36803 - RNA, 22 nt, Artificial Sequence
  RPE65 RNA guide
aaccuaaacuuacugggaaaau

SEQ ID NO: 36804 - RNA, 22 nt, Artificial Sequence
  RPE65 RNA guide
aaccuaucaaccuaaacuuacu

SEQ ID NO: 36805 - RNA, 22 nt, Artificial Sequence
  RPE65 RNA guide
aaccucaauuuccucaucugug

SEQ ID NO: 36806 - RNA, 22 nt, Artificial Sequence
  RPE65 RNA guide
aaccucacagaugaggaaauug

SEQ ID NO: 36807 - RNA, 22 nt, Artificial Sequence
  RPE65 RNA guide
aacguaaacucaagggacauug

SEQ ID NO: 36808 - RNA, 22 nt, Artificial Sequence
  RPE65 RNA guide
aacuaggauucuaacccagcuu

SEQ ID NO: 36809 - RNA, 22 nt, Artificial Sequence
  RPE65 RNA guide
aacucaagggacauugugucug

SEQ ID NO: 36810 - RNA, 22 nt, Artificial Sequence
  RPE65 RNA guide
aacuccucugaaccucaauuuc

SEQ ID NO: 36811 - RNA, 22 nt, Artificial Sequence
  RPE65 RNA guide
aacuuacugggaaaauuccgga

SEQ ID NO: 36812 - RNA, 22 nt, Artificial Sequence
  RPE65 RNA guide
aacuucccccagggcugcaugg

SEQ ID NO: 36813 - RNA, 22 nt, Artificial Sequence
  RPE65 RNA guide
aacuuucuauaucacaccaugc

SEQ ID NO: 36814 - RNA, 22 nt, Artificial Sequence
  RPE65 RNA guide
aagaaaaacauaaaaguaacag

SEQ ID NO: 36815 - RNA, 22 nt, Artificial Sequence
  RPE65 RNA guide
aagaaagugagcuaauaaaacc

SEQ ID NO: 36816 - RNA, 22 nt, Artificial Sequence
  RPE65 RNA guide
aagaauaaaggguuuuauuagc

SEQ ID NO: 36817 - RNA, 22 nt, Artificial Sequence
  RPE65 RNA guide
aagaguauagacaggagcaauc

SEQ ID NO: 36818 - RNA, 22 nt, Artificial Sequence
  RPE65 RNA guide
aagauaaaaacguaaacucaag

SEQ ID NO: 36819 - RNA, 22 nt, Artificial Sequence
  RPE65 RNA guide
aagcagggcagacacaaugucc

SEQ ID NO: 36820 - RNA, 22 nt, Artificial Sequence
  RPE65 RNA guide
aagcuccacaugggcuguacgg

SEQ ID NO: 36821 - RNA, 22 nt, Artificial Sequence
  RPE65 RNA guide
aagcuggguuagaauccuaguu

SEQ ID NO: 36822 - RNA, 22 nt, Artificial Sequence
  RPE65 RNA guide
aaggacauugaaacauagggaa

SEQ ID NO: 36823 - RNA, 22 nt, Artificial Sequence
  RPE65 RNA guide
aagggacauugugucugcccug

SEQ ID NO: 36824 - RNA, 22 nt, Artificial Sequence
  RPE65 RNA guide
aaggguuuuauuagcucacuuu

SEQ ID NO: 36825 - RNA, 22 nt, Artificial Sequence
  RPE65 RNA guide
aagucacaaucauaaaugcaca

SEQ ID NO: 36826 - RNA, 22 nt, Artificial Sequence
  RPE65 RNA guide
aagugagcuaauaaaacccuuu

SEQ ID NO: 36827 - RNA, 22 nt, Artificial Sequence
  RPE65 RNA guide
aagugauuggcauauguggcca

SEQ ID NO: 36828 - RNA, 22 nt, Artificial Sequence
  RPE65 RNA guide
aaguucacauaggacccccacc

SEQ ID NO: 36829 - RNA, 22 nt, Artificial Sequence
  RPE65 RNA guide
aaguucauguuguccugcucug

SEQ ID NO: 36830 - RNA, 22 nt, Artificial Sequence
  RPE65 RNA guide
aaguuuagguugauagguuaua

SEQ ID NO: 36831 - RNA, 22 nt, Artificial Sequence
  RPE65 RNA guide
aauauaauucagcacaccaugu

SEQ ID NO: 36832 - RNA, 22 nt, Artificial Sequence
  RPE65 RNA guide
aaucacuuaacuccucugaacc

SEQ ID NO: 36833 - RNA, 22 nt, Artificial Sequence
  RPE65 RNA guide
aauccguacagcccauguggag

SEQ ID NO: 36834 - RNA, 22 nt, Artificial Sequence
  RPE65 RNA guide
aauccuaguuggccagagcagg

SEQ ID NO: 36835 - RNA, 22 nt, Artificial Sequence
  RPE65 RNA guide
aaucucccucuguuacuuuuau

SEQ ID NO: 36836 - RNA, 22 nt, Artificial Sequence
  RPE65 RNA guide
aaugcacaacaugaagaauaaa

SEQ ID NO: 36837 - RNA, 22 nt, Artificial Sequence
  RPE65 RNA guide
aauggccauucuaagcuccaca

SEQ ID NO: 36838 - RNA, 22 nt, Artificial Sequence
  RPE65 RNA guide
aauggccauucuauguguccuc

SEQ ID NO: 36839 - RNA, 22 nt, Artificial Sequence
  RPE65 RNA guide
aaugucccuugaguuuacguuu

SEQ ID NO: 36840 - RNA, 22 nt, Artificial Sequence
  RPE65 RNA guide
aauuauauucuucucaaucucc

SEQ ID NO: 36841 - RNA, 22 nt, Artificial Sequence
  RPE65 RNA guide
aauucagcacaccauguccgga

SEQ ID NO: 36842 - RNA, 22 nt, Artificial Sequence
  RPE65 RNA guide
aauuccggacauggugugcuga

SEQ ID NO: 36843 - RNA, 22 nt, Artificial Sequence
  RPE65 RNA guide
aauugagguucagaggaguuaa

SEQ ID NO: 36844 - RNA, 22 nt, Artificial Sequence
  RPE65 RNA guide
aauuuccucaucugugagguuu

SEQ ID NO: 36845 - RNA, 22 nt, Artificial Sequence
  RPE65 RNA guide
aauuuucccaguaaguuuaggu

SEQ ID NO: 36846 - RNA, 22 nt, Artificial Sequence
  RPE65 RNA guide
acaacaugaacuuucuauauca

SEQ ID NO: 36847 - RNA, 22 nt, Artificial Sequence
  RPE65 RNA guide
acaaucauaaaugcacaacaug

SEQ ID NO: 36848 - RNA, 22 nt, Artificial Sequence
  RPE65 RNA guide
acaaugucccuugaguuuacgu

SEQ ID NO: 36849 - RNA, 22 nt, Artificial Sequence
  RPE65 RNA guide
acacaaugucccuugaguuuac

SEQ ID NO: 36850 - RNA, 22 nt, Artificial Sequence
  RPE65 RNA guide
acacauagaauggccauucuaa

SEQ ID NO: 36851 - RNA, 22 nt, Artificial Sequence
  RPE65 RNA guide
acaccaugcagcccugggggaa

SEQ ID NO: 36852 - RNA, 22 nt, Artificial Sequence
  RPE65 RNA guide
acaccauguccggaauuuuccc

SEQ ID NO: 36853 - RNA, 22 nt, Artificial Sequence
  RPE65 RNA guide
acagcccauguggagcuuagaa

SEQ ID NO: 36854 - RNA, 22 nt, Artificial Sequence
  RPE65 RNA guide
acaggagcaauccguacagccc

SEQ ID NO: 36855 - RNA, 22 nt, Artificial Sequence
  RPE65 RNA guide
acauaaaaguaacagagggaga

SEQ ID NO: 36856 - RNA, 22 nt, Artificial Sequence
  RPE65 RNA guide
acauagaauggccauucuaagc

SEQ ID NO: 36857 - RNA, 22 nt, Artificial Sequence
  RPE65 RNA guide
acauaggacccccacccccauc

SEQ ID NO: 36858 - RNA, 22 nt, Artificial Sequence
  RPE65 RNA guide
acauagggaagaguauagacag

SEQ ID NO: 36859 - RNA, 22 nt, Artificial Sequence
  RPE65 RNA guide
acauaugccaaucacuuaacuc

SEQ ID NO: 36860 - RNA, 22 nt, Artificial Sequence
  RPE65 RNA guide
acaugaacuuucuauaucacac

SEQ ID NO: 36861 - RNA, 22 nt, Artificial Sequence
  RPE65 RNA guide
acaugggcuguacggauugcuc

SEQ ID NO: 36862 - RNA, 22 nt, Artificial Sequence
  RPE65 RNA guide
acauugaaacauagggaagagu

SEQ ID NO: 36863 - RNA, 22 nt, Artificial Sequence
  RPE65 RNA guide
acauugugucugcccugcuugg

SEQ ID NO: 36864 - RNA, 22 nt, Artificial Sequence
  RPE65 RNA guide
accaagcagggcagacacaaug

SEQ ID NO: 36865 - RNA, 22 nt, Artificial Sequence
  RPE65 RNA guide
accaugcagcccugggggaagu

SEQ ID NO: 36866 - RNA, 22 nt, Artificial Sequence
  RPE65 RNA guide
accauguccggaauuuucccag

SEQ ID NO: 36867 - RNA, 22 nt, Artificial Sequence
  RPE65 RNA guide
acccagcuuggccacauaugcc

SEQ ID NO: 36868 - RNA, 22 nt, Artificial Sequence
  RPE65 RNA guide
accccaagaaagugagcuaaua

SEQ ID NO: 36869 - RNA, 22 nt, Artificial Sequence
  RPE65 RNA guide
acccccacccccaucaccuaua

SEQ ID NO: 36870 - RNA, 22 nt, Artificial Sequence
  RPE65 RNA guide
acccccaucaccuauaaccuau

SEQ ID NO: 36871 - RNA, 22 nt, Artificial Sequence
  RPE65 RNA guide
acccuuuauucuucauguugug

SEQ ID NO: 36872 - RNA, 22 nt, Artificial Sequence
  RPE65 RNA guide
accuaaacuuacugggaaaauu

SEQ ID NO: 36873 - RNA, 22 nt, Artificial Sequence
  RPE65 RNA guide
accuauaaccuaucaaccuaaa

SEQ ID NO: 36874 - RNA, 22 nt, Artificial Sequence
  RPE65 RNA guide
accuaucaaccuaaacuuacug

SEQ ID NO: 36875 - RNA, 22 nt, Artificial Sequence
  RPE65 RNA guide
accucaauuuccucaucuguga

SEQ ID NO: 36876 - RNA, 22 nt, Artificial Sequence
  RPE65 RNA guide
accucacagaugaggaaauuga

SEQ ID NO: 36877 - RNA, 22 nt, Artificial Sequence
  RPE65 RNA guide
acggauugcuccugucuauacu

SEQ ID NO: 36878 - RNA, 22 nt, Artificial Sequence
  RPE65 RNA guide
acguaaacucaagggacauugu

SEQ ID NO: 36879 - RNA, 22 nt, Artificial Sequence
  RPE65 RNA guide
acguuuuuaucuuuuaaaccuc

SEQ ID NO: 36880 - RNA, 22 nt, Artificial Sequence
  RPE65 RNA guide
acuaggauucuaacccagcuug

SEQ ID NO: 36881 - RNA, 22 nt, Artificial Sequence
  RPE65 RNA guide
acucaagggacauugugucugc

SEQ ID NO: 36882 - RNA, 22 nt, Artificial Sequence
  RPE65 RNA guide
acuccucugaaccucaauuucc

SEQ ID NO: 36883 - RNA, 22 nt, Artificial Sequence
  RPE65 RNA guide
acucuucccuauguuucaaugu

SEQ ID NO: 36884 - RNA, 22 nt, Artificial Sequence
  RPE65 RNA guide
acugggaaaauuccggacaugg

SEQ ID NO: 36885 - RNA, 22 nt, Artificial Sequence
  RPE65 RNA guide
acuuaacuccucugaaccucaa

SEQ ID NO: 36886 - RNA, 22 nt, Artificial Sequence
  RPE65 RNA guide
acuuacugggaaaauuccggac

SEQ ID NO: 36887 - RNA, 22 nt, Artificial Sequence
  RPE65 RNA guide
acuucccccagggcugcauggu

SEQ ID NO: 36888 - RNA, 22 nt, Artificial Sequence
  RPE65 RNA guide
acuugaugaggacacauagaau

SEQ ID NO: 36889 - RNA, 22 nt, Artificial Sequence
  RPE65 RNA guide
acuuucuauaucacaccaugca

SEQ ID NO: 36890 - RNA, 22 nt, Artificial Sequence
  RPE65 RNA guide
acuuucuuggggugaccaagca

SEQ ID NO: 36891 - RNA, 22 nt, Artificial Sequence
  RPE65 RNA guide
agaaaaacauaaaaguaacaga

SEQ ID NO: 36892 - RNA, 22 nt, Artificial Sequence
  RPE65 RNA guide
agaaagugagcuaauaaaaccc

SEQ ID NO: 36893 - RNA, 22 nt, Artificial Sequence
  RPE65 RNA guide
agaaaguucauguuguccugcu

SEQ ID NO: 36894 - RNA, 22 nt, Artificial Sequence
  RPE65 RNA guide
agaauaaaggguuuuauuagcu

SEQ ID NO: 36895 - RNA, 22 nt, Artificial Sequence
  RPE65 RNA guide
agaauccuaguuggccagagca

SEQ ID NO: 36896 - RNA, 22 nt, Artificial Sequence
  RPE65 RNA guide
agaauggccauucuaagcucca

SEQ ID NO: 36897 - RNA, 22 nt, Artificial Sequence
  RPE65 RNA guide
agaauggccauucuaugugucc

SEQ ID NO: 36898 - RNA, 22 nt, Artificial Sequence
  RPE65 RNA guide
agacacaaugucccuugaguuu

SEQ ID NO: 36899 - RNA, 22 nt, Artificial Sequence
  RPE65 RNA guide
agacaggagcaauccguacagc

SEQ ID NO: 36900 - RNA, 22 nt, Artificial Sequence
  RPE65 RNA guide
agagcaggacaacaugaacuuu

SEQ ID NO: 36901 - RNA, 22 nt, Artificial Sequence
  RPE65 RNA guide
agaggaguuaagugauuggcau

SEQ ID NO: 36902 - RNA, 22 nt, Artificial Sequence
  RPE65 RNA guide
agaguauagacaggagcaaucc

SEQ ID NO: 36903 - RNA, 22 nt, Artificial Sequence
  RPE65 RNA guide
agauaaaaacguaaacucaagg

SEQ ID NO: 36904 - RNA, 22 nt, Artificial Sequence
  RPE65 RNA guide
agauugagaagaauauaauuca

SEQ ID NO: 36905 - RNA, 22 nt, Artificial Sequence
  RPE65 RNA guide
agcaauccguacagcccaugug

SEQ ID NO: 36906 - RNA, 22 nt, Artificial Sequence
  RPE65 RNA guide
agcacaccauguccggaauuuu

SEQ ID NO: 36907 - RNA, 22 nt, Artificial Sequence
  RPE65 RNA guide
agcaggacaacaugaacuuucu

SEQ ID NO: 36908 - RNA, 22 nt, Artificial Sequence
  RPE65 RNA guide
agcagggcagacacaauguccc

SEQ ID NO: 36909 - RNA, 22 nt, Artificial Sequence
  RPE65 RNA guide
agcccauguggagcuuagaaug

SEQ ID NO: 36910 - RNA, 22 nt, Artificial Sequence
  RPE65 RNA guide
agcccugggggaaguucacaua

SEQ ID NO: 36911 - RNA, 22 nt, Artificial Sequence
  RPE65 RNA guide
agcucacuuucuuggggugacc

SEQ ID NO: 36912 - RNA, 22 nt, Artificial Sequence
  RPE65 RNA guide
agcuccacaugggcuguacgga

SEQ ID NO: 36913 - RNA, 22 nt, Artificial Sequence
  RPE65 RNA guide
agcuggguuagaauccuaguug

SEQ ID NO: 36914 - RNA, 22 nt, Artificial Sequence
  RPE65 RNA guide
agcuuagaauggccauucuaug

SEQ ID NO: 36915 - RNA, 22 nt, Artificial Sequence
  RPE65 RNA guide
agcuuggccacauaugccaauc

SEQ ID NO: 36916 - RNA, 22 nt, Artificial Sequence
  RPE65 RNA guide
aggaaauugagguucagaggag

SEQ ID NO: 36917 - RNA, 22 nt, Artificial Sequence
  RPE65 RNA guide
aggacaacaugaacuuucuaua

SEQ ID NO: 36918 - RNA, 22 nt, Artificial Sequence
  RPE65 RNA guide
aggacacauagaauggccauuc

SEQ ID NO: 36919 - RNA, 22 nt, Artificial Sequence
  RPE65 RNA guide
aggacauugaaacauagggaag

SEQ ID NO: 36920 - RNA, 22 nt, Artificial Sequence
  RPE65 RNA guide
aggacccccacccccaucaccu

SEQ ID NO: 36921 - RNA, 22 nt, Artificial Sequence
  RPE65 RNA guide
aggagcaauccguacagcccau

SEQ ID NO: 36922 - RNA, 22 nt, Artificial Sequence
  RPE65 RNA guide
aggaguuaagugauuggcauau

SEQ ID NO: 36923 - RNA, 22 nt, Artificial Sequence
  RPE65 RNA guide
aggauucuaacccagcuuggcc

SEQ ID NO: 36924 - RNA, 22 nt, Artificial Sequence
  RPE65 RNA guide
agggaagaguauagacaggagc

SEQ ID NO: 36925 - RNA, 22 nt, Artificial Sequence
  RPE65 RNA guide
agggacauugugucugcccugc

SEQ ID NO: 36926 - RNA, 22 nt, Artificial Sequence
  RPE65 RNA guide
agggcagacacaaugucccuug

SEQ ID NO: 36927 - RNA, 22 nt, Artificial Sequence
  RPE65 RNA guide
agggcugcauggugugauauag

SEQ ID NO: 36928 - RNA, 22 nt, Artificial Sequence
  RPE65 RNA guide
aggguuuuauuagcucacuuuc

SEQ ID NO: 36929 - RNA, 22 nt, Artificial Sequence
  RPE65 RNA guide
aggugauggggguggggguccu

SEQ ID NO: 36930 - RNA, 22 nt, Artificial Sequence
  RPE65 RNA guide
agguuauaggugaugggggugg

SEQ ID NO: 36931 - RNA, 22 nt, Artificial Sequence
  RPE65 RNA guide
agguucagaggaguuaagugau

SEQ ID NO: 36932 - RNA, 22 nt, Artificial Sequence
  RPE65 RNA guide
agguugauagguuauaggugau

SEQ ID NO: 36933 - RNA, 22 nt, Artificial Sequence
  RPE65 RNA guide
aguaaguuuagguugauagguu

SEQ ID NO: 36934 - RNA, 22 nt, Artificial Sequence
  RPE65 RNA guide
aguauagacaggagcaauccgu

SEQ ID NO: 36935 - RNA, 22 nt, Artificial Sequence
  RPE65 RNA guide
agucacaaucauaaaugcacaa

SEQ ID NO: 36936 - RNA, 22 nt, Artificial Sequence
  RPE65 RNA guide
agugagcuaauaaaacccuuua

SEQ ID NO: 36937 - RNA, 22 nt, Artificial Sequence
  RPE65 RNA guide
agugauuggcauauguggccaa

SEQ ID NO: 36938 - RNA, 22 nt, Artificial Sequence
  RPE65 RNA guide
aguuaagugauuggcauaugug

SEQ ID NO: 36939 - RNA, 22 nt, Artificial Sequence
  RPE65 RNA guide
aguucacauaggacccccaccc

SEQ ID NO: 36940 - RNA, 22 nt, Artificial Sequence
  RPE65 RNA guide
aguucauguuguccugcucugg

SEQ ID NO: 36941 - RNA, 22 nt, Artificial Sequence
  RPE65 RNA guide
aguuggccagagcaggacaaca

SEQ ID NO: 36942 - RNA, 22 nt, Artificial Sequence
  RPE65 RNA guide
aguuuagguugauagguuauag

SEQ ID NO: 36943 - RNA, 22 nt, Artificial Sequence
  RPE65 RNA guide
auaaaaacguaaacucaaggga

SEQ ID NO: 36944 - RNA, 22 nt, Artificial Sequence
  RPE65 RNA guide
auaaaaguaacagagggagauu

SEQ ID NO: 36945 - RNA, 22 nt, Artificial Sequence
  RPE65 RNA guide
auaaaggguuuuauuagcucac

SEQ ID NO: 36946 - RNA, 22 nt, Artificial Sequence
  RPE65 RNA guide
auaaccuaucaaccuaaacuua

SEQ ID NO: 36947 - RNA, 22 nt, Artificial Sequence
  RPE65 RNA guide
auaauucagcacaccauguccg

SEQ ID NO: 36948 - RNA, 22 nt, Artificial Sequence
  RPE65 RNA guide
auacucuucccuauguuucaau

SEQ ID NO: 36949 - RNA, 22 nt, Artificial Sequence
  RPE65 RNA guide
auagaaaguucauguuguccug

SEQ ID NO: 36950 - RNA, 22 nt, Artificial Sequence
  RPE65 RNA guide
auagaauggccauucuaagcuc

SEQ ID NO: 36951 - RNA, 22 nt, Artificial Sequence
  RPE65 RNA guide
auagacaggagcaauccguaca

SEQ ID NO: 36952 - RNA, 22 nt, Artificial Sequence
  RPE65 RNA guide
auaggacccccacccccaucac

SEQ ID NO: 36953 - RNA, 22 nt, Artificial Sequence
  RPE65 RNA guide
auagggaagaguauagacagga

SEQ ID NO: 36954 - RNA, 22 nt, Artificial Sequence
  RPE65 RNA guide
auaggugauggggguggggguc

SEQ ID NO: 36955 - RNA, 22 nt, Artificial Sequence
  RPE65 RNA guide
auagguuauaggugaugggggu

SEQ ID NO: 36956 - RNA, 22 nt, Artificial Sequence
  RPE65 RNA guide
auauaauucagcacaccauguc

SEQ ID NO: 36957 - RNA, 22 nt, Artificial Sequence
  RPE65 RNA guide
auauagaaaguucauguugucc

SEQ ID NO: 36958 - RNA, 22 nt, Artificial Sequence
  RPE65 RNA guide
auaucacaccaugcagcccugg

SEQ ID NO: 36959 - RNA, 22 nt, Artificial Sequence
  RPE65 RNA guide
auaugccaaucacuuaacuccu

SEQ ID NO: 36960 - RNA, 22 nt, Artificial Sequence
  RPE65 RNA guide
auauguggccaagcuggguuag

SEQ ID NO: 36961 - RNA, 22 nt, Artificial Sequence
  RPE65 RNA guide
aucaaccuaaacuuacugggaa

SEQ ID NO: 36962 - RNA, 22 nt, Artificial Sequence
  RPE65 RNA guide
aucaagucacaaucauaaaugc

SEQ ID NO: 36963 - RNA, 22 nt, Artificial Sequence
  RPE65 RNA guide
aucacaccaugcagcccugggg

SEQ ID NO: 36964 - RNA, 22 nt, Artificial Sequence
  RPE65 RNA guide
aucaccuauaaccuaucaaccu

SEQ ID NO: 36965 - RNA, 22 nt, Artificial Sequence
  RPE65 RNA guide
aucacuuaacuccucugaaccu

SEQ ID NO: 36966 - RNA, 22 nt, Artificial Sequence
  RPE65 RNA guide
auccguacagcccauguggagc

SEQ ID NO: 36967 - RNA, 22 nt, Artificial Sequence
  RPE65 RNA guide
auccuaguuggccagagcagga

SEQ ID NO: 36968 - RNA, 22 nt, Artificial Sequence
  RPE65 RNA guide
aucucccucuguuacuuuuaug

SEQ ID NO: 36969 - RNA, 22 nt, Artificial Sequence
  RPE65 RNA guide
aucuuuuaaaccucacagauga

SEQ ID NO: 36970 - RNA, 22 nt, Artificial Sequence
  RPE65 RNA guide
augaacuuucuauaucacacca

SEQ ID NO: 36971 - RNA, 22 nt, Artificial Sequence
  RPE65 RNA guide
augaggaaauugagguucagag

SEQ ID NO: 36972 - RNA, 22 nt, Artificial Sequence
  RPE65 RNA guide
augaggacacauagaauggcca

SEQ ID NO: 36973 - RNA, 22 nt, Artificial Sequence
  RPE65 RNA guide
augauugugacuugaugaggac

SEQ ID NO: 36974 - RNA, 22 nt, Artificial Sequence
  RPE65 RNA guide
augcacaacaugaagaauaaag

SEQ ID NO: 36975 - RNA, 22 nt, Artificial Sequence
  RPE65 RNA guide
augcagcccugggggaaguuca

SEQ ID NO: 36976 - RNA, 22 nt, Artificial Sequence
  RPE65 RNA guide
augccaaucacuuaacuccucu

SEQ ID NO: 36977 - RNA, 22 nt, Artificial Sequence
  RPE65 RNA guide
auggccauucuaagcuccacau

SEQ ID NO: 36978 - RNA, 22 nt, Artificial Sequence
  RPE65 RNA guide
auggccauucuauguguccuca

SEQ ID NO: 36979 - RNA, 22 nt, Artificial Sequence
  RPE65 RNA guide
augggcuguacggauugcuccu

SEQ ID NO: 36980 - RNA, 22 nt, Artificial Sequence
  RPE65 RNA guide
auggggguggggguccuaugug

SEQ ID NO: 36981 - RNA, 22 nt, Artificial Sequence
  RPE65 RNA guide
auggugugauauagaaaguuca

SEQ ID NO: 36982 - RNA, 22 nt, Artificial Sequence
  RPE65 RNA guide
augucccuugaguuuacguuuu

SEQ ID NO: 36983 - RNA, 22 nt, Artificial Sequence
  RPE65 RNA guide
auguccggaauuuucccaguaa

SEQ ID NO: 36984 - RNA, 22 nt, Artificial Sequence
  RPE65 RNA guide
augugaacuucccccagggcug

SEQ ID NO: 36985 - RNA, 22 nt, Artificial Sequence
  RPE65 RNA guide
auguggagcuuagaauggccau

SEQ ID NO: 36986 - RNA, 22 nt, Artificial Sequence
  RPE65 RNA guide
auguggccaagcuggguuagaa

SEQ ID NO: 36987 - RNA, 22 nt, Artificial Sequence
  RPE65 RNA guide
auguguccucaucaagucacaa

SEQ ID NO: 36988 - RNA, 22 nt, Artificial Sequence
  RPE65 RNA guide
auguuguccugcucuggccaac

SEQ ID NO: 36989 - RNA, 22 nt, Artificial Sequence
  RPE65 RNA guide
auguugugcauuuaugauugug

SEQ ID NO: 36990 - RNA, 22 nt, Artificial Sequence
  RPE65 RNA guide
auuagcucacuuucuuggggug

SEQ ID NO: 36991 - RNA, 22 nt, Artificial Sequence
  RPE65 RNA guide
auucagcacaccauguccggaa

SEQ ID NO: 36992 - RNA, 22 nt, Artificial Sequence
  RPE65 RNA guide
auuccggacauggugugcugaa

SEQ ID NO: 36993 - RNA, 22 nt, Artificial Sequence
  RPE65 RNA guide
auucuaacccagcuuggccaca

SEQ ID NO: 36994 - RNA, 22 nt, Artificial Sequence
  RPE65 RNA guide
auucuaagcuccacaugggcug

SEQ ID NO: 36995 - RNA, 22 nt, Artificial Sequence
  RPE65 RNA guide
auucuauguguccucaucaagu

SEQ ID NO: 36996 - RNA, 22 nt, Artificial Sequence
  RPE65 RNA guide
auugaaacauagggaagaguau

SEQ ID NO: 36997 - RNA, 22 nt, Artificial Sequence
  RPE65 RNA guide
auugagaagaauauaauucagc

SEQ ID NO: 36998 - RNA, 22 nt, Artificial Sequence
  RPE65 RNA guide
auugagguucagaggaguuaag

SEQ ID NO: 36999 - RNA, 22 nt, Artificial Sequence
  RPE65 RNA guide
auugcuccugucuauacucuuc

SEQ ID NO: 37000 - RNA, 22 nt, Artificial Sequence
  RPE65 RNA guide
auuggcauauguggccaagcug

SEQ ID NO: 37001 - RNA, 22 nt, Artificial Sequence
  RPE65 RNA guide
auugugacuugaugaggacaca

SEQ ID NO: 37002 - RNA, 22 nt, Artificial Sequence
  RPE65 RNA guide
auugugucugcccugcuugguc

SEQ ID NO: 37003 - RNA, 22 nt, Artificial Sequence
  RPE65 RNA guide
auuuaugauugugacuugauga

SEQ ID NO: 37004 - RNA, 22 nt, Artificial Sequence
  RPE65 RNA guide
auuuccucaucugugagguuua

SEQ ID NO: 37005 - RNA, 22 nt, Artificial Sequence
  RPE65 RNA guide
auuuucccaguaaguuuagguu

SEQ ID NO: 37006 - RNA, 22 nt, Artificial Sequence
  RPE65 RNA guide
caacaugaacuuucuauaucac

SEQ ID NO: 37007 - RNA, 22 nt, Artificial Sequence
  RPE65 RNA guide
caaccuaaacuuacugggaaaa

SEQ ID NO: 37008 - RNA, 22 nt, Artificial Sequence
  RPE65 RNA guide
caacuaggauucuaacccagcu

SEQ ID NO: 37009 - RNA, 22 nt, Artificial Sequence
  RPE65 RNA guide
caagaaagugagcuaauaaaac

SEQ ID NO: 37010 - RNA, 22 nt, Artificial Sequence
  RPE65 RNA guide
caagcagggcagacacaauguc

SEQ ID NO: 37011 - RNA, 22 nt, Artificial Sequence
  RPE65 RNA guide
caagcuggguuagaauccuagu

SEQ ID NO: 37012 - RNA, 22 nt, Artificial Sequence
  RPE65 RNA guide
caagggacauugugucugcccu

SEQ ID NO: 37013 - RNA, 22 nt, Artificial Sequence
  RPE65 RNA guide
caagucacaaucauaaaugcac

SEQ ID NO: 37014 - RNA, 22 nt, Artificial Sequence
  RPE65 RNA guide
caaucacuuaacuccucugaac

SEQ ID NO: 37015 - RNA, 22 nt, Artificial Sequence
  RPE65 RNA guide
caaucauaaaugcacaacauga

SEQ ID NO: 37016 - RNA, 22 nt, Artificial Sequence
  RPE65 RNA guide
caauccguacagcccaugugga

SEQ ID NO: 37017 - RNA, 22 nt, Artificial Sequence
  RPE65 RNA guide
caaucucccucuguuacuuuua

SEQ ID NO: 37018 - RNA, 22 nt, Artificial Sequence
  RPE65 RNA guide
caaugucccuugaguuuacguu

SEQ ID NO: 37019 - RNA, 22 nt, Artificial Sequence
  RPE65 RNA guide
caauuuccucaucugugagguu

SEQ ID NO: 37020 - RNA, 22 nt, Artificial Sequence
  RPE65 RNA guide
cacaacaugaagaauaaagggu

SEQ ID NO: 37021 - RNA, 22 nt, Artificial Sequence
  RPE65 RNA guide
cacaaucauaaaugcacaacau

SEQ ID NO: 37022 - RNA, 22 nt, Artificial Sequence
  RPE65 RNA guide
cacaaugucccuugaguuuacg

SEQ ID NO: 37023 - RNA, 22 nt, Artificial Sequence
  RPE65 RNA guide
cacaccaugcagcccuggggga

SEQ ID NO: 37024 - RNA, 22 nt, Artificial Sequence
  RPE65 RNA guide
cacaccauguccggaauuuucc

SEQ ID NO: 37025 - RNA, 22 nt, Artificial Sequence
  RPE65 RNA guide
cacagaugaggaaauugagguu

SEQ ID NO: 37026 - RNA, 22 nt, Artificial Sequence
  RPE65 RNA guide
cacauagaauggccauucuaag

SEQ ID NO: 37027 - RNA, 22 nt, Artificial Sequence
  RPE65 RNA guide
cacauaggacccccacccccau

SEQ ID NO: 37028 - RNA, 22 nt, Artificial Sequence
  RPE65 RNA guide
cacauaugccaaucacuuaacu

SEQ ID NO: 37029 - RNA, 22 nt, Artificial Sequence
  RPE65 RNA guide
cacaugggcuguacggauugcu

SEQ ID NO: 37030 - RNA, 22 nt, Artificial Sequence
  RPE65 RNA guide
caccaugcagcccugggggaag

SEQ ID NO: 37031 - RNA, 22 nt, Artificial Sequence
  RPE65 RNA guide
caccauguccggaauuuuccca

SEQ ID NO: 37032 - RNA, 22 nt, Artificial Sequence
  RPE65 RNA guide
caccccaagaaagugagcuaau

SEQ ID NO: 37033 - RNA, 22 nt, Artificial Sequence
  RPE65 RNA guide
cacccccaucaccuauaaccua

SEQ ID NO: 37034 - RNA, 22 nt, Artificial Sequence
  RPE65 RNA guide
caccuauaaccuaucaaccuaa

SEQ ID NO: 37035 - RNA, 22 nt, Artificial Sequence
  RPE65 RNA guide
cacuuaacuccucugaaccuca

SEQ ID NO: 37036 - RNA, 22 nt, Artificial Sequence
  RPE65 RNA guide
cacuuucuuggggugaccaagc

SEQ ID NO: 37037 - RNA, 22 nt, Artificial Sequence
  RPE65 RNA guide
cagacacaaugucccuugaguu

SEQ ID NO: 37038 - RNA, 22 nt, Artificial Sequence
  RPE65 RNA guide
cagagcaggacaacaugaacuu

SEQ ID NO: 37039 - RNA, 22 nt, Artificial Sequence
  RPE65 RNA guide
cagaggaguuaagugauuggca

SEQ ID NO: 37040 - RNA, 22 nt, Artificial Sequence
  RPE65 RNA guide
cagcacaccauguccggaauuu

SEQ ID NO: 37041 - RNA, 22 nt, Artificial Sequence
  RPE65 RNA guide
cagcccauguggagcuuagaau

SEQ ID NO: 37042 - RNA, 22 nt, Artificial Sequence
  RPE65 RNA guide
cagcccugggggaaguucacau

SEQ ID NO: 37043 - RNA, 22 nt, Artificial Sequence
  RPE65 RNA guide
cagcuuggccacauaugccaau

SEQ ID NO: 37044 - RNA, 22 nt, Artificial Sequence
  RPE65 RNA guide
caggacaacaugaacuuucuau

SEQ ID NO: 37045 - RNA, 22 nt, Artificial Sequence
  RPE65 RNA guide
caggagcaauccguacagccca

SEQ ID NO: 37046 - RNA, 22 nt, Artificial Sequence
  RPE65 RNA guide
cagggcagacacaaugucccuu

SEQ ID NO: 37047 - RNA, 22 nt, Artificial Sequence
  RPE65 RNA guide
cagggcugcauggugugauaua

SEQ ID NO: 37048 - RNA, 22 nt, Artificial Sequence
  RPE65 RNA guide
caguaaguuuagguugauaggu

SEQ ID NO: 37049 - RNA, 22 nt, Artificial Sequence
  RPE65 RNA guide
cauaaaaguaacagagggagau

SEQ ID NO: 37050 - RNA, 22 nt, Artificial Sequence
  RPE65 RNA guide
cauagaauggccauucuaagcu

SEQ ID NO: 37051 - RNA, 22 nt, Artificial Sequence
  RPE65 RNA guide
cauaggacccccacccccauca

SEQ ID NO: 37052 - RNA, 22 nt, Artificial Sequence
  RPE65 RNA guide
cauagggaagaguauagacagg

SEQ ID NO: 37053 - RNA, 22 nt, Artificial Sequence
  RPE65 RNA guide
cauaugccaaucacuuaacucc

SEQ ID NO: 37054 - RNA, 22 nt, Artificial Sequence
  RPE65 RNA guide
cauauguggccaagcuggguua

SEQ ID NO: 37055 - RNA, 22 nt, Artificial Sequence
  RPE65 RNA guide
caucaagucacaaucauaaaug

SEQ ID NO: 37056 - RNA, 22 nt, Artificial Sequence
  RPE65 RNA guide
caucaccuauaaccuaucaacc

SEQ ID NO: 37057 - RNA, 22 nt, Artificial Sequence
  RPE65 RNA guide
caugaacuuucuauaucacacc

SEQ ID NO: 37058 - RNA, 22 nt, Artificial Sequence
  RPE65 RNA guide
caugaagaauaaaggguuuuau

SEQ ID NO: 37059 - RNA, 22 nt, Artificial Sequence
  RPE65 RNA guide
caugcagcccugggggaaguuc

SEQ ID NO: 37060 - RNA, 22 nt, Artificial Sequence
  RPE65 RNA guide
caugggcuguacggauugcucc

SEQ ID NO: 37061 - RNA, 22 nt, Artificial Sequence
  RPE65 RNA guide
cauggugugauauagaaaguuc

SEQ ID NO: 37062 - RNA, 22 nt, Artificial Sequence
  RPE65 RNA guide
cauguccggaauuuucccagua

SEQ ID NO: 37063 - RNA, 22 nt, Artificial Sequence
  RPE65 RNA guide
cauguggagcuuagaauggcca

SEQ ID NO: 37064 - RNA, 22 nt, Artificial Sequence
  RPE65 RNA guide
cauguuguccugcucuggccaa

SEQ ID NO: 37065 - RNA, 22 nt, Artificial Sequence
  RPE65 RNA guide
cauguugugcauuuaugauugu

SEQ ID NO: 37066 - RNA, 22 nt, Artificial Sequence
  RPE65 RNA guide
cauucuaagcuccacaugggcu

SEQ ID NO: 37067 - RNA, 22 nt, Artificial Sequence
  RPE65 RNA guide
cauucuauguguccucaucaag

SEQ ID NO: 37068 - RNA, 22 nt, Artificial Sequence
  RPE65 RNA guide
cauugaaacauagggaagagua

SEQ ID NO: 37069 - RNA, 22 nt, Artificial Sequence
  RPE65 RNA guide
cauugugucugcccugcuuggu

SEQ ID NO: 37070 - RNA, 22 nt, Artificial Sequence
  RPE65 RNA guide
cauuuaugauugugacuugaug

SEQ ID NO: 37071 - RNA, 22 nt, Artificial Sequence
  RPE65 RNA guide
ccaacuaggauucuaacccagc

SEQ ID NO: 37072 - RNA, 22 nt, Artificial Sequence
  RPE65 RNA guide
ccaagaaagugagcuaauaaaa

SEQ ID NO: 37073 - RNA, 22 nt, Artificial Sequence
  RPE65 RNA guide
ccaagcagggcagacacaaugu

SEQ ID NO: 37074 - RNA, 22 nt, Artificial Sequence
  RPE65 RNA guide
ccaagcuggguuagaauccuag

SEQ ID NO: 37075 - RNA, 22 nt, Artificial Sequence
  RPE65 RNA guide
ccaaucacuuaacuccucugaa

SEQ ID NO: 37076 - RNA, 22 nt, Artificial Sequence
  RPE65 RNA guide
ccacauaugccaaucacuuaac

SEQ ID NO: 37077 - RNA, 22 nt, Artificial Sequence
  RPE65 RNA guide
ccacaugggcuguacggauugc

SEQ ID NO: 37078 - RNA, 22 nt, Artificial Sequence
  RPE65 RNA guide
ccacccccaucaccuauaaccu

SEQ ID NO: 37079 - RNA, 22 nt, Artificial Sequence
  RPE65 RNA guide
ccagagcaggacaacaugaacu

SEQ ID NO: 37080 - RNA, 22 nt, Artificial Sequence
  RPE65 RNA guide
ccagcuuggccacauaugccaa

SEQ ID NO: 37081 - RNA, 22 nt, Artificial Sequence
  RPE65 RNA guide
ccagggcugcauggugugauau

SEQ ID NO: 37082 - RNA, 22 nt, Artificial Sequence
  RPE65 RNA guide
ccaguaaguuuagguugauagg

SEQ ID NO: 37083 - RNA, 22 nt, Artificial Sequence
  RPE65 RNA guide
ccaucaccuauaaccuaucaac

SEQ ID NO: 37084 - RNA, 22 nt, Artificial Sequence
  RPE65 RNA guide
ccaugcagcccugggggaaguu

SEQ ID NO: 37085 - RNA, 22 nt, Artificial Sequence
  RPE65 RNA guide
ccauguccggaauuuucccagu

SEQ ID NO: 37086 - RNA, 22 nt, Artificial Sequence
  RPE65 RNA guide
ccauguggagcuuagaauggcc

SEQ ID NO: 37087 - RNA, 22 nt, Artificial Sequence
  RPE65 RNA guide
ccauucuaagcuccacaugggc

SEQ ID NO: 37088 - RNA, 22 nt, Artificial Sequence
  RPE65 RNA guide
ccauucuauguguccucaucaa

SEQ ID NO: 37089 - RNA, 22 nt, Artificial Sequence
  RPE65 RNA guide
cccaagaaagugagcuaauaaa

SEQ ID NO: 37090 - RNA, 22 nt, Artificial Sequence
  RPE65 RNA guide
cccacccccaucaccuauaacc

SEQ ID NO: 37091 - RNA, 22 nt, Artificial Sequence
  RPE65 RNA guide
cccagcuuggccacauaugcca

SEQ ID NO: 37092 - RNA, 22 nt, Artificial Sequence
  RPE65 RNA guide
cccagggcugcauggugugaua

SEQ ID NO: 37093 - RNA, 22 nt, Artificial Sequence
  RPE65 RNA guide
cccaguaaguuuagguugauag

SEQ ID NO: 37094 - RNA, 22 nt, Artificial Sequence
  RPE65 RNA guide
cccaucaccuauaaccuaucaa

SEQ ID NO: 37095 - RNA, 22 nt, Artificial Sequence
  RPE65 RNA guide
cccauguggagcuuagaauggc

SEQ ID NO: 37096 - RNA, 22 nt, Artificial Sequence
  RPE65 RNA guide
ccccaagaaagugagcuaauaa

SEQ ID NO: 37097 - RNA, 22 nt, Artificial Sequence
  RPE65 RNA guide
ccccacccccaucaccuauaac

SEQ ID NO: 37098 - RNA, 22 nt, Artificial Sequence
  RPE65 RNA guide
ccccagggcugcauggugugau

SEQ ID NO: 37099 - RNA, 22 nt, Artificial Sequence
  RPE65 RNA guide
ccccaucaccuauaaccuauca

SEQ ID NO: 37100 - RNA, 22 nt, Artificial Sequence
  RPE65 RNA guide
cccccacccccaucaccuauaa

SEQ ID NO: 37101 - RNA, 22 nt, Artificial Sequence
  RPE65 RNA guide
cccccagggcugcaugguguga

SEQ ID NO: 37102 - RNA, 22 nt, Artificial Sequence
  RPE65 RNA guide
cccccaucaccuauaaccuauc

SEQ ID NO: 37103 - RNA, 22 nt, Artificial Sequence
  RPE65 RNA guide
cccucuguuacuuuuauguuuu

SEQ ID NO: 37104 - RNA, 22 nt, Artificial Sequence
  RPE65 RNA guide
cccugcuuggucaccccaagaa

SEQ ID NO: 37105 - RNA, 22 nt, Artificial Sequence
  RPE65 RNA guide
cccugggggaaguucacauagg

SEQ ID NO: 37106 - RNA, 22 nt, Artificial Sequence
  RPE65 RNA guide
cccuugaguuuacguuuuuauc

SEQ ID NO: 37107 - RNA, 22 nt, Artificial Sequence
  RPE65 RNA guide
cccuuuauucuucauguugugc

SEQ ID NO: 37108 - RNA, 22 nt, Artificial Sequence
  RPE65 RNA guide
ccggaauuuucccaguaaguuu

SEQ ID NO: 37109 - RNA, 22 nt, Artificial Sequence
  RPE65 RNA guide
ccggacauggugugcugaauua

SEQ ID NO: 37110 - RNA, 22 nt, Artificial Sequence
  RPE65 RNA guide
ccguacagcccauguggagcuu

SEQ ID NO: 37111 - RNA, 22 nt, Artificial Sequence
  RPE65 RNA guide
ccuaaacuuacugggaaaauuc

SEQ ID NO: 37112 - RNA, 22 nt, Artificial Sequence
  RPE65 RNA guide
ccuaguuggccagagcaggaca

SEQ ID NO: 37113 - RNA, 22 nt, Artificial Sequence
  RPE65 RNA guide
ccuauaaccuaucaaccuaaac

SEQ ID NO: 37114 - RNA, 22 nt, Artificial Sequence
  RPE65 RNA guide
ccuaucaaccuaaacuuacugg

SEQ ID NO: 37115 - RNA, 22 nt, Artificial Sequence
  RPE65 RNA guide
ccuaugugaacuucccccaggg

SEQ ID NO: 37116 - RNA, 22 nt, Artificial Sequence
  RPE65 RNA guide
ccucaauuuccucaucugugag

SEQ ID NO: 37117 - RNA, 22 nt, Artificial Sequence
  RPE65 RNA guide
ccucacagaugaggaaauugag

SEQ ID NO: 37118 - RNA, 22 nt, Artificial Sequence
  RPE65 RNA guide
ccucaucaagucacaaucauaa

SEQ ID NO: 37119 - RNA, 22 nt, Artificial Sequence
  RPE65 RNA guide
ccucaucugugagguuuaaaag

SEQ ID NO: 37120 - RNA, 22 nt, Artificial Sequence
  RPE65 RNA guide
ccucuguuacuuuuauguuuuu

SEQ ID NO: 37121 - RNA, 22 nt, Artificial Sequence
  RPE65 RNA guide
ccugcucuggccaacuaggauu

SEQ ID NO: 37122 - RNA, 22 nt, Artificial Sequence
  RPE65 RNA guide
ccugcuuggucaccccaagaaa

SEQ ID NO: 37123 - RNA, 22 nt, Artificial Sequence
  RPE65 RNA guide
ccugggggaaguucacauagga

SEQ ID NO: 37124 - RNA, 22 nt, Artificial Sequence
  RPE65 RNA guide
ccugucuauacucuucccuaug

SEQ ID NO: 37125 - RNA, 22 nt, Artificial Sequence
  RPE65 RNA guide
ccuuuauucuucauguugugca

SEQ ID NO: 37126 - RNA, 22 nt, Artificial Sequence
  RPE65 RNA guide
cggaauuuucccaguaaguuua

SEQ ID NO: 37127 - RNA, 22 nt, Artificial Sequence
  RPE65 RNA guide
cggauugcuccugucuauacuc

SEQ ID NO: 37128 - RNA, 22 nt, Artificial Sequence
  RPE65 RNA guide
cguaaacucaagggacauugug

SEQ ID NO: 37129 - RNA, 22 nt, Artificial Sequence
  RPE65 RNA guide
cguacagcccauguggagcuua

SEQ ID NO: 37130 - RNA, 22 nt, Artificial Sequence
  RPE65 RNA guide
cguuuuuaucuuuuaaaccuca

SEQ ID NO: 37131 - RNA, 22 nt, Artificial Sequence
  RPE65 RNA guide
cuaaacuuacugggaaaauucc

SEQ ID NO: 37132 - RNA, 22 nt, Artificial Sequence
  RPE65 RNA guide
cuaacccagcuuggccacauau

SEQ ID NO: 37133 - RNA, 22 nt, Artificial Sequence
  RPE65 RNA guide
cuaagcuccacaugggcuguac

SEQ ID NO: 37134 - RNA, 22 nt, Artificial Sequence
  RPE65 RNA guide
cuaggauucuaacccagcuugg

SEQ ID NO: 37135 - RNA, 22 nt, Artificial Sequence
  RPE65 RNA guide
cuaguuggccagagcaggacaa

SEQ ID NO: 37136 - RNA, 22 nt, Artificial Sequence
  RPE65 RNA guide
cuauaaccuaucaaccuaaacu

SEQ ID NO: 37137 - RNA, 22 nt, Artificial Sequence
  RPE65 RNA guide
cuauacucuucccuauguuuca

SEQ ID NO: 37138 - RNA, 22 nt, Artificial Sequence
  RPE65 RNA guide
cuauaucacaccaugcagcccu

SEQ ID NO: 37139 - RNA, 22 nt, Artificial Sequence
  RPE65 RNA guide
cuaucaaccuaaacuuacuggg

SEQ ID NO: 37140 - RNA, 22 nt, Artificial Sequence
  RPE65 RNA guide
cuaugugaacuucccccagggc

SEQ ID NO: 37141 - RNA, 22 nt, Artificial Sequence
  RPE65 RNA guide
cuauguguccucaucaagucac

SEQ ID NO: 37142 - RNA, 22 nt, Artificial Sequence
  RPE65 RNA guide
cucaagggacauugugucugcc

SEQ ID NO: 37143 - RNA, 22 nt, Artificial Sequence
  RPE65 RNA guide
cucaaucucccucuguuacuuu

SEQ ID NO: 37144 - RNA, 22 nt, Artificial Sequence
  RPE65 RNA guide
cucaauuuccucaucugugagg

SEQ ID NO: 37145 - RNA, 22 nt, Artificial Sequence
  RPE65 RNA guide
cucacagaugaggaaauugagg

SEQ ID NO: 37146 - RNA, 22 nt, Artificial Sequence
  RPE65 RNA guide
cucacuuucuuggggugaccaa

SEQ ID NO: 37147 - RNA, 22 nt, Artificial Sequence
  RPE65 RNA guide
cucaucaagucacaaucauaaa

SEQ ID NO: 37148 - RNA, 22 nt, Artificial Sequence
  RPE65 RNA guide
cucaucugugagguuuaaaaga

SEQ ID NO: 37149 - RNA, 22 nt, Artificial Sequence
  RPE65 RNA guide
cuccacaugggcuguacggauu

SEQ ID NO: 37150 - RNA, 22 nt, Artificial Sequence
  RPE65 RNA guide
cucccucuguuacuuuuauguu

SEQ ID NO: 37151 - RNA, 22 nt, Artificial Sequence
  RPE65 RNA guide
cuccucugaaccucaauuuccu

SEQ ID NO: 37152 - RNA, 22 nt, Artificial Sequence
  RPE65 RNA guide
cuccugucuauacucuucccua

SEQ ID NO: 37153 - RNA, 22 nt, Artificial Sequence
  RPE65 RNA guide
cucuggccaacuaggauucuaa

SEQ ID NO: 37154 - RNA, 22 nt, Artificial Sequence
  RPE65 RNA guide
cucuucccuauguuucaauguc

SEQ ID NO: 37155 - RNA, 22 nt, Artificial Sequence
  RPE65 RNA guide
cugaaccucaauuuccucaucu

SEQ ID NO: 37156 - RNA, 22 nt, Artificial Sequence
  RPE65 RNA guide
cugaaggacauugaaacauagg

SEQ ID NO: 37157 - RNA, 22 nt, Artificial Sequence
  RPE65 RNA guide
cugaauuauauucuucucaauc

SEQ ID NO: 37158 - RNA, 22 nt, Artificial Sequence
  RPE65 RNA guide
cugcauggugugauauagaaag

SEQ ID NO: 37159 - RNA, 22 nt, Artificial Sequence
  RPE65 RNA guide
cugcccugcuuggucaccccaa

SEQ ID NO: 37160 - RNA, 22 nt, Artificial Sequence
  RPE65 RNA guide
cugcucuggccaacuaggauuc

SEQ ID NO: 37161 - RNA, 22 nt, Artificial Sequence
  RPE65 RNA guide
cugcuuggucaccccaagaaag

SEQ ID NO: 37162 - RNA, 22 nt, Artificial Sequence
  RPE65 RNA guide
cuggccaacuaggauucuaacc

SEQ ID NO: 37163 - RNA, 22 nt, Artificial Sequence
  RPE65 RNA guide
cugggaaaauuccggacauggu

SEQ ID NO: 37164 - RNA, 22 nt, Artificial Sequence
  RPE65 RNA guide
cugggggaaguucacauaggac

SEQ ID NO: 37165 - RNA, 22 nt, Artificial Sequence
  RPE65 RNA guide
cuggguuagaauccuaguuggc

SEQ ID NO: 37166 - RNA, 22 nt, Artificial Sequence
  RPE65 RNA guide
cuguacggauugcuccugucua

SEQ ID NO: 37167 - RNA, 22 nt, Artificial Sequence
  RPE65 RNA guide
cugucuauacucuucccuaugu

SEQ ID NO: 37168 - RNA, 22 nt, Artificial Sequence
  RPE65 RNA guide
cugugagguuuaaaagauaaaa

SEQ ID NO: 37169 - RNA, 22 nt, Artificial Sequence
  RPE65 RNA guide
cuuaacuccucugaaccucaau

SEQ ID NO: 37170 - RNA, 22 nt, Artificial Sequence
  RPE65 RNA guide
cuuacugggaaaauuccggaca

SEQ ID NO: 37171 - RNA, 22 nt, Artificial Sequence
  RPE65 RNA guide
cuuagaauggccauucuaugug

SEQ ID NO: 37172 - RNA, 22 nt, Artificial Sequence
  RPE65 RNA guide
cuucauguugugcauuuaugau

SEQ ID NO: 37173 - RNA, 22 nt, Artificial Sequence
  RPE65 RNA guide
cuucccccagggcugcauggug

SEQ ID NO: 37174 - RNA, 22 nt, Artificial Sequence
  RPE65 RNA guide
cuucccuauguuucaauguccu

SEQ ID NO: 37175 - RNA, 22 nt, Artificial Sequence
  RPE65 RNA guide
cuucucaaucucccucuguuac

SEQ ID NO: 37176 - RNA, 22 nt, Artificial Sequence
  RPE65 RNA guide
cuugaugaggacacauagaaug

SEQ ID NO: 37177 - RNA, 22 nt, Artificial Sequence
  RPE65 RNA guide
cuuggccacauaugccaaucac

SEQ ID NO: 37178 - RNA, 22 nt, Artificial Sequence
  RPE65 RNA guide
cuuggggugaccaagcagggca

SEQ ID NO: 37179 - RNA, 22 nt, Artificial Sequence
  RPE65 RNA guide
cuuggucaccccaagaaaguga

SEQ ID NO: 37180 - RNA, 22 nt, Artificial Sequence
  RPE65 RNA guide
cuuucuauaucacaccaugcag

SEQ ID NO: 37181 - RNA, 22 nt, Artificial Sequence
  RPE65 RNA guide
cuuucuuggggugaccaagcag

SEQ ID NO: 37182 - RNA, 22 nt, Artificial Sequence
  RPE65 RNA guide
cuuuuaaaccucacagaugagg

SEQ ID NO: 37183 - RNA, 22 nt, Artificial Sequence
  RPE65 RNA guide
gaaaaacauaaaaguaacagag

SEQ ID NO: 37184 - RNA, 22 nt, Artificial Sequence
  RPE65 RNA guide
gaaaauuccggacauggugugc

SEQ ID NO: 37185 - RNA, 22 nt, Artificial Sequence
  RPE65 RNA guide
gaaacauagggaagaguauaga

SEQ ID NO: 37186 - RNA, 22 nt, Artificial Sequence
  RPE65 RNA guide
gaaagugagcuaauaaaacccu

SEQ ID NO: 37187 - RNA, 22 nt, Artificial Sequence
  RPE65 RNA guide
gaaaguucauguuguccugcuc

SEQ ID NO: 37188 - RNA, 22 nt, Artificial Sequence
  RPE65 RNA guide
gaaauugagguucagaggaguu

SEQ ID NO: 37189 - RNA, 22 nt, Artificial Sequence
  RPE65 RNA guide
gaaccucaauuuccucaucugu

SEQ ID NO: 37190 - RNA, 22 nt, Artificial Sequence
  RPE65 RNA guide
gaacuucccccagggcugcaug

SEQ ID NO: 37191 - RNA, 22 nt, Artificial Sequence
  RPE65 RNA guide
gaacuuucuauaucacaccaug

SEQ ID NO: 37192 - RNA, 22 nt, Artificial Sequence
  RPE65 RNA guide
gaagaaaaacauaaaaguaaca

SEQ ID NO: 37193 - RNA, 22 nt, Artificial Sequence
  RPE65 RNA guide
gaagaauaaaggguuuuauuag

SEQ ID NO: 37194 - RNA, 22 nt, Artificial Sequence
  RPE65 RNA guide
gaagaguauagacaggagcaau

SEQ ID NO: 37195 - RNA, 22 nt, Artificial Sequence
  RPE65 RNA guide
gaaggacauugaaacauaggga

SEQ ID NO: 37196 - RNA, 22 nt, Artificial Sequence
  RPE65 RNA guide
gaaguucacauaggacccccac

SEQ ID NO: 37197 - RNA, 22 nt, Artificial Sequence
  RPE65 RNA guide
gaauaaaggguuuuauuagcuc

SEQ ID NO: 37198 - RNA, 22 nt, Artificial Sequence
  RPE65 RNA guide
gaauauaauucagcacaccaug

SEQ ID NO: 37199 - RNA, 22 nt, Artificial Sequence
  RPE65 RNA guide
gaauccuaguuggccagagcag

SEQ ID NO: 37200 - RNA, 22 nt, Artificial Sequence
  RPE65 RNA guide
gaauggccauucuaagcuccac

SEQ ID NO: 37201 - RNA, 22 nt, Artificial Sequence
  RPE65 RNA guide
gaauggccauucuauguguccu

SEQ ID NO: 37202 - RNA, 22 nt, Artificial Sequence
  RPE65 RNA guide
gaauuauauucuucucaaucuc

SEQ ID NO: 37203 - RNA, 22 nt, Artificial Sequence
  RPE65 RNA guide
gaauuuucccaguaaguuuagg

SEQ ID NO: 37204 - RNA, 22 nt, Artificial Sequence
  RPE65 RNA guide
gacaacaugaacuuucuauauc

SEQ ID NO: 37205 - RNA, 22 nt, Artificial Sequence
  RPE65 RNA guide
gacacaaugucccuugaguuua

SEQ ID NO: 37206 - RNA, 22 nt, Artificial Sequence
  RPE65 RNA guide
gacacauagaauggccauucua

SEQ ID NO: 37207 - RNA, 22 nt, Artificial Sequence
  RPE65 RNA guide
gacaggagcaauccguacagcc

SEQ ID NO: 37208 - RNA, 22 nt, Artificial Sequence
  RPE65 RNA guide
gacauugaaacauagggaagag

SEQ ID NO: 37209 - RNA, 22 nt, Artificial Sequence
  RPE65 RNA guide
gacauugugucugcccugcuug

SEQ ID NO: 37210 - RNA, 22 nt, Artificial Sequence
  RPE65 RNA guide
gaccaagcagggcagacacaau

SEQ ID NO: 37211 - RNA, 22 nt, Artificial Sequence
  RPE65 RNA guide
gacccccacccccaucaccuau

SEQ ID NO: 37212 - RNA, 22 nt, Artificial Sequence
  RPE65 RNA guide
gacuugaugaggacacauagaa

SEQ ID NO: 37213 - RNA, 22 nt, Artificial Sequence
  RPE65 RNA guide
gagauugagaagaauauaauuc

SEQ ID NO: 37214 - RNA, 22 nt, Artificial Sequence
  RPE65 RNA guide
gagcaauccguacagcccaugu

SEQ ID NO: 37215 - RNA, 22 nt, Artificial Sequence
  RPE65 RNA guide
gagcaggacaacaugaacuuuc

SEQ ID NO: 37216 - RNA, 22 nt, Artificial Sequence
  RPE65 RNA guide
gagcuaauaaaacccuuuauuc

SEQ ID NO: 37217 - RNA, 22 nt, Artificial Sequence
  RPE65 RNA guide
gagcuuagaauggccauucuau

SEQ ID NO: 37218 - RNA, 22 nt, Artificial Sequence
  RPE65 RNA guide
gaggaaauugagguucagagga

SEQ ID NO: 37219 - RNA, 22 nt, Artificial Sequence
  RPE65 RNA guide
gaggacacauagaauggccauu

SEQ ID NO: 37220 - RNA, 22 nt, Artificial Sequence
  RPE65 RNA guide
gaggaguuaagugauuggcaua

SEQ ID NO: 37221 - RNA, 22 nt, Artificial Sequence
  RPE65 RNA guide
gagguucagaggaguuaaguga

SEQ ID NO: 37222 - RNA, 22 nt, Artificial Sequence
  RPE65 RNA guide
gaguauagacaggagcaauccg

SEQ ID NO: 37223 - RNA, 22 nt, Artificial Sequence
  RPE65 RNA guide
gaguuaagugauuggcauaugu

SEQ ID NO: 37224 - RNA, 22 nt, Artificial Sequence
  RPE65 RNA guide
gauaaaaacguaaacucaaggg

SEQ ID NO: 37225 - RNA, 22 nt, Artificial Sequence
  RPE65 RNA guide
gauagguuauaggugauggggg

SEQ ID NO: 37226 - RNA, 22 nt, Artificial Sequence
  RPE65 RNA guide
gauauagaaaguucauguuguc

SEQ ID NO: 37227 - RNA, 22 nt, Artificial Sequence
  RPE65 RNA guide
gaugaggaaauugagguucaga

SEQ ID NO: 37228 - RNA, 22 nt, Artificial Sequence
  RPE65 RNA guide
gaugaggacacauagaauggcc

SEQ ID NO: 37229 - RNA, 22 nt, Artificial Sequence
  RPE65 RNA guide
gauggggguggggguccuaugu

SEQ ID NO: 37230 - RNA, 22 nt, Artificial Sequence
  RPE65 RNA guide
gauucuaacccagcuuggccac

SEQ ID NO: 37231 - RNA, 22 nt, Artificial Sequence
  RPE65 RNA guide
gauugagaagaauauaauucag

SEQ ID NO: 37232 - RNA, 22 nt, Artificial Sequence
  RPE65 RNA guide
gauugcuccugucuauacucuu

SEQ ID NO: 37233 - RNA, 22 nt, Artificial Sequence
  RPE65 RNA guide
gauuggcauauguggccaagcu

SEQ ID NO: 37234 - RNA, 22 nt, Artificial Sequence
  RPE65 RNA guide
gauugugacuugaugaggacac

SEQ ID NO: 37235 - RNA, 22 nt, Artificial Sequence
  RPE65 RNA guide
gcaauccguacagcccaugugg

SEQ ID NO: 37236 - RNA, 22 nt, Artificial Sequence
  RPE65 RNA guide
gcacaacaugaagaauaaaggg

SEQ ID NO: 37237 - RNA, 22 nt, Artificial Sequence
  RPE65 RNA guide
gcacaccauguccggaauuuuc

SEQ ID NO: 37238 - RNA, 22 nt, Artificial Sequence
  RPE65 RNA guide
gcagacacaaugucccuugagu

SEQ ID NO: 37239 - RNA, 22 nt, Artificial Sequence
  RPE65 RNA guide
gcagcccugggggaaguucaca

SEQ ID NO: 37240 - RNA, 22 nt, Artificial Sequence
  RPE65 RNA guide
gcaggacaacaugaacuuucua

SEQ ID NO: 37241 - RNA, 22 nt, Artificial Sequence
  RPE65 RNA guide
gcagggcagacacaaugucccu

SEQ ID NO: 37242 - RNA, 22 nt, Artificial Sequence
  RPE65 RNA guide
gcauauguggccaagcuggguu

SEQ ID NO: 37243 - RNA, 22 nt, Artificial Sequence
  RPE65 RNA guide
gcauggugugauauagaaaguu

SEQ ID NO: 37244 - RNA, 22 nt, Artificial Sequence
  RPE65 RNA guide
gcauuuaugauugugacuugau

SEQ ID NO: 37245 - RNA, 22 nt, Artificial Sequence
  RPE65 RNA guide
gccaacuaggauucuaacccag

SEQ ID NO: 37246 - RNA, 22 nt, Artificial Sequence
  RPE65 RNA guide
gccaagcuggguuagaauccua

SEQ ID NO: 37247 - RNA, 22 nt, Artificial Sequence
  RPE65 RNA guide
gccaaucacuuaacuccucuga

SEQ ID NO: 37248 - RNA, 22 nt, Artificial Sequence
  RPE65 RNA guide
gccacauaugccaaucacuuaa

SEQ ID NO: 37249 - RNA, 22 nt, Artificial Sequence
  RPE65 RNA guide
gccagagcaggacaacaugaac

SEQ ID NO: 37250 - RNA, 22 nt, Artificial Sequence
  RPE65 RNA guide
gccauucuaagcuccacauggg

SEQ ID NO: 37251 - RNA, 22 nt, Artificial Sequence
  RPE65 RNA guide
gccauucuauguguccucauca

SEQ ID NO: 37252 - RNA, 22 nt, Artificial Sequence
  RPE65 RNA guide
gcccauguggagcuuagaaugg

SEQ ID NO: 37253 - RNA, 22 nt, Artificial Sequence
  RPE65 RNA guide
gcccugcuuggucaccccaaga

SEQ ID NO: 37254 - RNA, 22 nt, Artificial Sequence
  RPE65 RNA guide
gcccugggggaaguucacauag

SEQ ID NO: 37255 - RNA, 22 nt, Artificial Sequence
  RPE65 RNA guide
gcuaauaaaacccuuuauucuu

SEQ ID NO: 37256 - RNA, 22 nt, Artificial Sequence
  RPE65 RNA guide
gcucacuuucuuggggugacca

SEQ ID NO: 37257 - RNA, 22 nt, Artificial Sequence
  RPE65 RNA guide
gcuccacaugggcuguacggau

SEQ ID NO: 37258 - RNA, 22 nt, Artificial Sequence
  RPE65 RNA guide
gcuccugucuauacucuucccu

SEQ ID NO: 37259 - RNA, 22 nt, Artificial Sequence
  RPE65 RNA guide
gcucuggccaacuaggauucua

SEQ ID NO: 37260 - RNA, 22 nt, Artificial Sequence
  RPE65 RNA guide
gcugaauuauauucuucucaau

SEQ ID NO: 37261 - RNA, 22 nt, Artificial Sequence
  RPE65 RNA guide
gcugcauggugugauauagaaa

SEQ ID NO: 37262 - RNA, 22 nt, Artificial Sequence
  RPE65 RNA guide
gcuggguuagaauccuaguugg

SEQ ID NO: 37263 - RNA, 22 nt, Artificial Sequence
  RPE65 RNA guide
gcuguacggauugcuccugucu

SEQ ID NO: 37264 - RNA, 22 nt, Artificial Sequence
  RPE65 RNA guide
gcuuagaauggccauucuaugu

SEQ ID NO: 37265 - RNA, 22 nt, Artificial Sequence
  RPE65 RNA guide
gcuuggccacauaugccaauca

SEQ ID NO: 37266 - RNA, 22 nt, Artificial Sequence
  RPE65 RNA guide
gcuuggucaccccaagaaagug

SEQ ID NO: 37267 - RNA, 22 nt, Artificial Sequence
  RPE65 RNA guide
ggaaaauuccggacauggugug

SEQ ID NO: 37268 - RNA, 22 nt, Artificial Sequence
  RPE65 RNA guide
ggaaauugagguucagaggagu

SEQ ID NO: 37269 - RNA, 22 nt, Artificial Sequence
  RPE65 RNA guide
ggaagaguauagacaggagcaa

SEQ ID NO: 37270 - RNA, 22 nt, Artificial Sequence
  RPE65 RNA guide
ggaaguucacauaggaccccca

SEQ ID NO: 37271 - RNA, 22 nt, Artificial Sequence
  RPE65 RNA guide
ggaauuuucccaguaaguuuag

SEQ ID NO: 37272 - RNA, 22 nt, Artificial Sequence
  RPE65 RNA guide
ggacaacaugaacuuucuauau

SEQ ID NO: 37273 - RNA, 22 nt, Artificial Sequence
  RPE65 RNA guide
ggacacauagaauggccauucu

SEQ ID NO: 37274 - RNA, 22 nt, Artificial Sequence
  RPE65 RNA guide
ggacauugaaacauagggaaga

SEQ ID NO: 37275 - RNA, 22 nt, Artificial Sequence
  RPE65 RNA guide
ggacauugugucugcccugcuu

SEQ ID NO: 37276 - RNA, 22 nt, Artificial Sequence
  RPE65 RNA guide
ggacccccacccccaucaccua

SEQ ID NO: 37277 - RNA, 22 nt, Artificial Sequence
  RPE65 RNA guide
ggagauugagaagaauauaauu

SEQ ID NO: 37278 - RNA, 22 nt, Artificial Sequence
  RPE65 RNA guide
ggagcaauccguacagcccaug

SEQ ID NO: 37279 - RNA, 22 nt, Artificial Sequence
  RPE65 RNA guide
ggagcuuagaauggccauucua

SEQ ID NO: 37280 - RNA, 22 nt, Artificial Sequence
  RPE65 RNA guide
ggaguuaagugauuggcauaug

SEQ ID NO: 37281 - RNA, 22 nt, Artificial Sequence
  RPE65 RNA guide
ggauucuaacccagcuuggcca

SEQ ID NO: 37282 - RNA, 22 nt, Artificial Sequence
  RPE65 RNA guide
ggauugcuccugucuauacucu

SEQ ID NO: 37283 - RNA, 22 nt, Artificial Sequence
  RPE65 RNA guide
ggcagacacaaugucccuugag

SEQ ID NO: 37284 - RNA, 22 nt, Artificial Sequence
  RPE65 RNA guide
ggcauauguggccaagcugggu

SEQ ID NO: 37285 - RNA, 22 nt, Artificial Sequence
  RPE65 RNA guide
ggccaacuaggauucuaaccca

SEQ ID NO: 37286 - RNA, 22 nt, Artificial Sequence
  RPE65 RNA guide
ggccaagcuggguuagaauccu

SEQ ID NO: 37287 - RNA, 22 nt, Artificial Sequence
  RPE65 RNA guide
ggccacauaugccaaucacuua

SEQ ID NO: 37288 - RNA, 22 nt, Artificial Sequence
  RPE65 RNA guide
ggccagagcaggacaacaugaa

SEQ ID NO: 37289 - RNA, 22 nt, Artificial Sequence
  RPE65 RNA guide
ggccauucuaagcuccacaugg

SEQ ID NO: 37290 - RNA, 22 nt, Artificial Sequence
  RPE65 RNA guide
ggccauucuauguguccucauc

SEQ ID NO: 37291 - RNA, 22 nt, Artificial Sequence
  RPE65 RNA guide
ggcugcauggugugauauagaa

SEQ ID NO: 37292 - RNA, 22 nt, Artificial Sequence
  RPE65 RNA guide
ggcuguacggauugcuccuguc

SEQ ID NO: 37293 - RNA, 22 nt, Artificial Sequence
  RPE65 RNA guide
gggaaaauuccggacauggugu

SEQ ID NO: 37294 - RNA, 22 nt, Artificial Sequence
  RPE65 RNA guide
gggaagaguauagacaggagca

SEQ ID NO: 37295 - RNA, 22 nt, Artificial Sequence
  RPE65 RNA guide
gggaaguucacauaggaccccc

SEQ ID NO: 37296 - RNA, 22 nt, Artificial Sequence
  RPE65 RNA guide
gggacauugugucugcccugcu

SEQ ID NO: 37297 - RNA, 22 nt, Artificial Sequence
  RPE65 RNA guide
gggcagacacaaugucccuuga

SEQ ID NO: 37298 - RNA, 22 nt, Artificial Sequence
  RPE65 RNA guide
gggcugcauggugugauauaga

SEQ ID NO: 37299 - RNA, 22 nt, Artificial Sequence
  RPE65 RNA guide
gggcuguacggauugcuccugu

SEQ ID NO: 37300 - RNA, 22 nt, Artificial Sequence
  RPE65 RNA guide
ggggaaguucacauaggacccc

SEQ ID NO: 37301 - RNA, 22 nt, Artificial Sequence
  RPE65 RNA guide
gggggaaguucacauaggaccc

SEQ ID NO: 37302 - RNA, 22 nt, Artificial Sequence
  RPE65 RNA guide
ggggguccuaugugaacuuccc

SEQ ID NO: 37303 - RNA, 22 nt, Artificial Sequence
  RPE65 RNA guide
ggggguggggguccuaugugaa

SEQ ID NO: 37304 - RNA, 22 nt, Artificial Sequence
  RPE65 RNA guide
gggguccuaugugaacuucccc

SEQ ID NO: 37305 - RNA, 22 nt, Artificial Sequence
  RPE65 RNA guide
ggggugaccaagcagggcagac

SEQ ID NO: 37306 - RNA, 22 nt, Artificial Sequence
  RPE65 RNA guide
gggguggggguccuaugugaac

SEQ ID NO: 37307 - RNA, 22 nt, Artificial Sequence
  RPE65 RNA guide
ggguccuaugugaacuuccccc

SEQ ID NO: 37308 - RNA, 22 nt, Artificial Sequence
  RPE65 RNA guide
gggugaccaagcagggcagaca

SEQ ID NO: 37309 - RNA, 22 nt, Artificial Sequence
  RPE65 RNA guide
ggguggggguccuaugugaacu

SEQ ID NO: 37310 - RNA, 22 nt, Artificial Sequence
  RPE65 RNA guide
ggguuagaauccuaguuggcca

SEQ ID NO: 37311 - RNA, 22 nt, Artificial Sequence
  RPE65 RNA guide
ggguuuuauuagcucacuuucu

SEQ ID NO: 37312 - RNA, 22 nt, Artificial Sequence
  RPE65 RNA guide
ggucaccccaagaaagugagcu

SEQ ID NO: 37313 - RNA, 22 nt, Artificial Sequence
  RPE65 RNA guide
gguccuaugugaacuuccccca

SEQ ID NO: 37314 - RNA, 22 nt, Artificial Sequence
  RPE65 RNA guide
ggugaccaagcagggcagacac

SEQ ID NO: 37315 - RNA, 22 nt, Artificial Sequence
  RPE65 RNA guide
ggugauggggguggggguccua

SEQ ID NO: 37316 - RNA, 22 nt, Artificial Sequence
  RPE65 RNA guide
gguggggguccuaugugaacuu

SEQ ID NO: 37317 - RNA, 22 nt, Artificial Sequence
  RPE65 RNA guide
ggugugauauagaaaguucaug

SEQ ID NO: 37318 - RNA, 22 nt, Artificial Sequence
  RPE65 RNA guide
gguuagaauccuaguuggccag

SEQ ID NO: 37319 - RNA, 22 nt, Artificial Sequence
  RPE65 RNA guide
gguuauaggugauggggguggg

SEQ ID NO: 37320 - RNA, 22 nt, Artificial Sequence
  RPE65 RNA guide
gguucagaggaguuaagugauu

SEQ ID NO: 37321 - RNA, 22 nt, Artificial Sequence
  RPE65 RNA guide
gguugauagguuauaggugaug

SEQ ID NO: 37322 - RNA, 22 nt, Artificial Sequence
  RPE65 RNA guide
gguuuuauuagcucacuuucuu

SEQ ID NO: 37323 - RNA, 22 nt, Artificial Sequence
  RPE65 RNA guide
guaaacucaagggacauugugu

SEQ ID NO: 37324 - RNA, 22 nt, Artificial Sequence
  RPE65 RNA guide
guaaguuuagguugauagguua

SEQ ID NO: 37325 - RNA, 22 nt, Artificial Sequence
  RPE65 RNA guide
guacagcccauguggagcuuag

SEQ ID NO: 37326 - RNA, 22 nt, Artificial Sequence
  RPE65 RNA guide
guacggauugcuccugucuaua

SEQ ID NO: 37327 - RNA, 22 nt, Artificial Sequence
  RPE65 RNA guide
guauagacaggagcaauccgua

SEQ ID NO: 37328 - RNA, 22 nt, Artificial Sequence
  RPE65 RNA guide
gucacaaucauaaaugcacaac

SEQ ID NO: 37329 - RNA, 22 nt, Artificial Sequence
  RPE65 RNA guide
gucaccccaagaaagugagcua

SEQ ID NO: 37330 - RNA, 22 nt, Artificial Sequence
  RPE65 RNA guide
gucccuugaguuuacguuuuua

SEQ ID NO: 37331 - RNA, 22 nt, Artificial Sequence
  RPE65 RNA guide
guccggaauuuucccaguaagu

SEQ ID NO: 37332 - RNA, 22 nt, Artificial Sequence
  RPE65 RNA guide
guccuaugugaacuucccccag

SEQ ID NO: 37333 - RNA, 22 nt, Artificial Sequence
  RPE65 RNA guide
guccucaucaagucacaaucau

SEQ ID NO: 37334 - RNA, 22 nt, Artificial Sequence
  RPE65 RNA guide
guccugcucuggccaacuagga

SEQ ID NO: 37335 - RNA, 22 nt, Artificial Sequence
  RPE65 RNA guide
gucuauacucuucccuauguuu

SEQ ID NO: 37336 - RNA, 22 nt, Artificial Sequence
  RPE65 RNA guide
gucugcccugcuuggucacccc

SEQ ID NO: 37337 - RNA, 22 nt, Artificial Sequence
  RPE65 RNA guide
gugaacuucccccagggcugca

SEQ ID NO: 37338 - RNA, 22 nt, Artificial Sequence
  RPE65 RNA guide
gugaccaagcagggcagacaca

SEQ ID NO: 37339 - RNA, 22 nt, Artificial Sequence
  RPE65 RNA guide
gugacuugaugaggacacauag

SEQ ID NO: 37340 - RNA, 22 nt, Artificial Sequence
  RPE65 RNA guide
gugagcuaauaaaacccuuuau

SEQ ID NO: 37341 - RNA, 22 nt, Artificial Sequence
  RPE65 RNA guide
gugauauagaaaguucauguug

SEQ ID NO: 37342 - RNA, 22 nt, Artificial Sequence
  RPE65 RNA guide
gugauggggguggggguccuau

SEQ ID NO: 37343 - RNA, 22 nt, Artificial Sequence
  RPE65 RNA guide
gugauuggcauauguggccaag

SEQ ID NO: 37344 - RNA, 22 nt, Artificial Sequence
  RPE65 RNA guide
gugcauuuaugauugugacuug

SEQ ID NO: 37345 - RNA, 22 nt, Artificial Sequence
  RPE65 RNA guide
guggagcuuagaauggccauuc

SEQ ID NO: 37346 - RNA, 22 nt, Artificial Sequence
  RPE65 RNA guide
guggccaagcuggguuagaauc

SEQ ID NO: 37347 - RNA, 22 nt, Artificial Sequence
  RPE65 RNA guide
guggggguccuaugugaacuuc

SEQ ID NO: 37348 - RNA, 22 nt, Artificial Sequence
  RPE65 RNA guide
guguccucaucaagucacaauc

SEQ ID NO: 37349 - RNA, 22 nt, Artificial Sequence
  RPE65 RNA guide
gugucugcccugcuuggucacc

SEQ ID NO: 37350 - RNA, 22 nt, Artificial Sequence
  RPE65 RNA guide
gugugauauagaaaguucaugu

SEQ ID NO: 37351 - RNA, 22 nt, Artificial Sequence
  RPE65 RNA guide
guuaagugauuggcauaugugg

SEQ ID NO: 37352 - RNA, 22 nt, Artificial Sequence
  RPE65 RNA guide
guuagaauccuaguuggccaga

SEQ ID NO: 37353 - RNA, 22 nt, Artificial Sequence
  RPE65 RNA guide
guuauaggugaugggggugggg

SEQ ID NO: 37354 - RNA, 22 nt, Artificial Sequence
  RPE65 RNA guide
guucacauaggacccccacccc

SEQ ID NO: 37355 - RNA, 22 nt, Artificial Sequence
  RPE65 RNA guide
guucagaggaguuaagugauug

SEQ ID NO: 37356 - RNA, 22 nt, Artificial Sequence
  RPE65 RNA guide
guucauguuguccugcucuggc

SEQ ID NO: 37357 - RNA, 22 nt, Artificial Sequence
  RPE65 RNA guide
guugauagguuauaggugaugg

SEQ ID NO: 37358 - RNA, 22 nt, Artificial Sequence
  RPE65 RNA guide
guuggccagagcaggacaacau

SEQ ID NO: 37359 - RNA, 22 nt, Artificial Sequence
  RPE65 RNA guide
guuguccugcucuggccaacua

SEQ ID NO: 37360 - RNA, 22 nt, Artificial Sequence
  RPE65 RNA guide
guugugcauuuaugauugugac

SEQ ID NO: 37361 - RNA, 22 nt, Artificial Sequence
  RPE65 RNA guide
guuuagguugauagguuauagg

SEQ ID NO: 37362 - RNA, 22 nt, Artificial Sequence
  RPE65 RNA guide
guuuuauuagcucacuuucuug

SEQ ID NO: 37363 - RNA, 22 nt, Artificial Sequence
  RPE65 RNA guide
uaaaaacguaaacucaagggac

SEQ ID NO: 37364 - RNA, 22 nt, Artificial Sequence
  RPE65 RNA guide
uaaaacccuuuauucuucaugu

SEQ ID NO: 37365 - RNA, 22 nt, Artificial Sequence
  RPE65 RNA guide
uaaaaguaacagagggagauug

SEQ ID NO: 37366 - RNA, 22 nt, Artificial Sequence
  RPE65 RNA guide
uaaaccucacagaugaggaaau

SEQ ID NO: 37367 - RNA, 22 nt, Artificial Sequence
  RPE65 RNA guide
uaaacucaagggacauuguguc

SEQ ID NO: 37368 - RNA, 22 nt, Artificial Sequence
  RPE65 RNA guide
uaaacuuacugggaaaauuccg

SEQ ID NO: 37369 - RNA, 22 nt, Artificial Sequence
  RPE65 RNA guide
uaaaggguuuuauuagcucacu

SEQ ID NO: 37370 - RNA, 22 nt, Artificial Sequence
  RPE65 RNA guide
uaaaugcacaacaugaagaaua

SEQ ID NO: 37371 - RNA, 22 nt, Artificial Sequence
  RPE65 RNA guide
uaacccagcuuggccacauaug

SEQ ID NO: 37372 - RNA, 22 nt, Artificial Sequence
  RPE65 RNA guide
uaaccuaucaaccuaaacuuac

SEQ ID NO: 37373 - RNA, 22 nt, Artificial Sequence
  RPE65 RNA guide
uaacuccucugaaccucaauuu

SEQ ID NO: 37374 - RNA, 22 nt, Artificial Sequence
  RPE65 RNA guide
uaagcuccacaugggcuguacg

SEQ ID NO: 37375 - RNA, 22 nt, Artificial Sequence
  RPE65 RNA guide
uaagugauuggcauauguggcc

SEQ ID NO: 37376 - RNA, 22 nt, Artificial Sequence
  RPE65 RNA guide
uaaguuuagguugauagguuau

SEQ ID NO: 37377 - RNA, 22 nt, Artificial Sequence
  RPE65 RNA guide
uaauucagcacaccauguccgg

SEQ ID NO: 37378 - RNA, 22 nt, Artificial Sequence
  RPE65 RNA guide
uacagcccauguggagcuuaga

SEQ ID NO: 37379 - RNA, 22 nt, Artificial Sequence
  RPE65 RNA guide
uacggauugcuccugucuauac

SEQ ID NO: 37380 - RNA, 22 nt, Artificial Sequence
  RPE65 RNA guide
uacucuucccuauguuucaaug

SEQ ID NO: 37381 - RNA, 22 nt, Artificial Sequence
  RPE65 RNA guide
uacugggaaaauuccggacaug

SEQ ID NO: 37382 - RNA, 22 nt, Artificial Sequence
  RPE65 RNA guide
uagaaaguucauguuguccugc

SEQ ID NO: 37383 - RNA, 22 nt, Artificial Sequence
  RPE65 RNA guide
uagaauccuaguuggccagagc

SEQ ID NO: 37384 - RNA, 22 nt, Artificial Sequence
  RPE65 RNA guide
uagaauggccauucuaagcucc

SEQ ID NO: 37385 - RNA, 22 nt, Artificial Sequence
  RPE65 RNA guide
uagaauggccauucuauguguc

SEQ ID NO: 37386 - RNA, 22 nt, Artificial Sequence
  RPE65 RNA guide
uagacaggagcaauccguacag

SEQ ID NO: 37387 - RNA, 22 nt, Artificial Sequence
  RPE65 RNA guide
uagcucacuuucuuggggugac

SEQ ID NO: 37388 - RNA, 22 nt, Artificial Sequence
  RPE65 RNA guide
uaggacccccacccccaucacc

SEQ ID NO: 37389 - RNA, 22 nt, Artificial Sequence
  RPE65 RNA guide
uaggauucuaacccagcuuggc

SEQ ID NO: 37390 - RNA, 22 nt, Artificial Sequence
  RPE65 RNA guide
uagggaagaguauagacaggag

SEQ ID NO: 37391 - RNA, 22 nt, Artificial Sequence
  RPE65 RNA guide
uaggugaugggggugggggucc

SEQ ID NO: 37392 - RNA, 22 nt, Artificial Sequence
  RPE65 RNA guide
uagguuauaggugaugggggug

SEQ ID NO: 37393 - RNA, 22 nt, Artificial Sequence
  RPE65 RNA guide
uagguugauagguuauagguga

SEQ ID NO: 37394 - RNA, 22 nt, Artificial Sequence
  RPE65 RNA guide
uaguuggccagagcaggacaac

SEQ ID NO: 37395 - RNA, 22 nt, Artificial Sequence
  RPE65 RNA guide
uauaaccuaucaaccuaaacuu

SEQ ID NO: 37396 - RNA, 22 nt, Artificial Sequence
  RPE65 RNA guide
uauaauucagcacaccaugucc

SEQ ID NO: 37397 - RNA, 22 nt, Artificial Sequence
  RPE65 RNA guide
uauacucuucccuauguuucaa

SEQ ID NO: 37398 - RNA, 22 nt, Artificial Sequence
  RPE65 RNA guide
uauagaaaguucauguuguccu

SEQ ID NO: 37399 - RNA, 22 nt, Artificial Sequence
  RPE65 RNA guide
uauagacaggagcaauccguac

SEQ ID NO: 37400 - RNA, 22 nt, Artificial Sequence
  RPE65 RNA guide
uauaggugaugggggugggggu

SEQ ID NO: 37401 - RNA, 22 nt, Artificial Sequence
  RPE65 RNA guide
uauaucacaccaugcagcccug

SEQ ID NO: 37402 - RNA, 22 nt, Artificial Sequence
  RPE65 RNA guide
uaucaaccuaaacuuacuggga

SEQ ID NO: 37403 - RNA, 22 nt, Artificial Sequence
  RPE65 RNA guide
uaucacaccaugcagcccuggg

SEQ ID NO: 37404 - RNA, 22 nt, Artificial Sequence
  RPE65 RNA guide
uaucuuuuaaaccucacagaug

SEQ ID NO: 37405 - RNA, 22 nt, Artificial Sequence
  RPE65 RNA guide
uaugauugugacuugaugagga

SEQ ID NO: 37406 - RNA, 22 nt, Artificial Sequence
  RPE65 RNA guide
uaugccaaucacuuaacuccuc

SEQ ID NO: 37407 - RNA, 22 nt, Artificial Sequence
  RPE65 RNA guide
uaugugaacuucccccagggcu

SEQ ID NO: 37408 - RNA, 22 nt, Artificial Sequence
  RPE65 RNA guide
uauguggccaagcuggguuaga

SEQ ID NO: 37409 - RNA, 22 nt, Artificial Sequence
  RPE65 RNA guide
uauguguccucaucaagucaca

SEQ ID NO: 37410 - RNA, 22 nt, Artificial Sequence
  RPE65 RNA guide
uauuagcucacuuucuuggggu

SEQ ID NO: 37411 - RNA, 22 nt, Artificial Sequence
  RPE65 RNA guide
ucaaccuaaacuuacugggaaa

SEQ ID NO: 37412 - RNA, 22 nt, Artificial Sequence
  RPE65 RNA guide
ucaagggacauugugucugccc

SEQ ID NO: 37413 - RNA, 22 nt, Artificial Sequence
  RPE65 RNA guide
ucaagucacaaucauaaaugca

SEQ ID NO: 37414 - RNA, 22 nt, Artificial Sequence
  RPE65 RNA guide
ucaaucucccucuguuacuuuu

SEQ ID NO: 37415 - RNA, 22 nt, Artificial Sequence
  RPE65 RNA guide
ucaauuuccucaucugugaggu

SEQ ID NO: 37416 - RNA, 22 nt, Artificial Sequence
  RPE65 RNA guide
ucacaaucauaaaugcacaaca

SEQ ID NO: 37417 - RNA, 22 nt, Artificial Sequence
  RPE65 RNA guide
ucacaccaugcagcccuggggg

SEQ ID NO: 37418 - RNA, 22 nt, Artificial Sequence
  RPE65 RNA guide
ucacagaugaggaaauugaggu

SEQ ID NO: 37419 - RNA, 22 nt, Artificial Sequence
  RPE65 RNA guide
ucacauaggacccccaccccca

SEQ ID NO: 37420 - RNA, 22 nt, Artificial Sequence
  RPE65 RNA guide
ucaccccaagaaagugagcuaa

SEQ ID NO: 37421 - RNA, 22 nt, Artificial Sequence
  RPE65 RNA guide
ucaccuauaaccuaucaaccua

SEQ ID NO: 37422 - RNA, 22 nt, Artificial Sequence
  RPE65 RNA guide
ucacuuaacuccucugaaccuc

SEQ ID NO: 37423 - RNA, 22 nt, Artificial Sequence
  RPE65 RNA guide
ucacuuucuuggggugaccaag

SEQ ID NO: 37424 - RNA, 22 nt, Artificial Sequence
  RPE65 RNA guide
ucagaggaguuaagugauuggc

SEQ ID NO: 37425 - RNA, 22 nt, Artificial Sequence
  RPE65 RNA guide
ucagcacaccauguccggaauu

SEQ ID NO: 37426 - RNA, 22 nt, Artificial Sequence
  RPE65 RNA guide
ucaucaagucacaaucauaaau

SEQ ID NO: 37427 - RNA, 22 nt, Artificial Sequence
  RPE65 RNA guide
ucauguuguccugcucuggcca

SEQ ID NO: 37428 - RNA, 22 nt, Artificial Sequence
  RPE65 RNA guide
ucauguugugcauuuaugauug

SEQ ID NO: 37429 - RNA, 22 nt, Artificial Sequence
  RPE65 RNA guide
uccacaugggcuguacggauug

SEQ ID NO: 37430 - RNA, 22 nt, Artificial Sequence
  RPE65 RNA guide
ucccaguaaguuuagguugaua

SEQ ID NO: 37431 - RNA, 22 nt, Artificial Sequence
  RPE65 RNA guide
ucccccagggcugcauggugug

SEQ ID NO: 37432 - RNA, 22 nt, Artificial Sequence
  RPE65 RNA guide
ucccucuguuacuuuuauguuu

SEQ ID NO: 37433 - RNA, 22 nt, Artificial Sequence
  RPE65 RNA guide
ucccuugaguuuacguuuuuau

SEQ ID NO: 37434 - RNA, 22 nt, Artificial Sequence
  RPE65 RNA guide
uccggaauuuucccaguaaguu

SEQ ID NO: 37435 - RNA, 22 nt, Artificial Sequence
  RPE65 RNA guide
uccggacauggugugcugaauu

SEQ ID NO: 37436 - RNA, 22 nt, Artificial Sequence
  RPE65 RNA guide
uccguacagcccauguggagcu

SEQ ID NO: 37437 - RNA, 22 nt, Artificial Sequence
  RPE65 RNA guide
uccuaguuggccagagcaggac

SEQ ID NO: 37438 - RNA, 22 nt, Artificial Sequence
  RPE65 RNA guide
uccuaugugaacuucccccagg

SEQ ID NO: 37439 - RNA, 22 nt, Artificial Sequence
  RPE65 RNA guide
uccucaucaagucacaaucaua

SEQ ID NO: 37440 - RNA, 22 nt, Artificial Sequence
  RPE65 RNA guide
uccucaucugugagguuuaaaa

SEQ ID NO: 37441 - RNA, 22 nt, Artificial Sequence
  RPE65 RNA guide
uccugcucuggccaacuaggau

SEQ ID NO: 37442 - RNA, 22 nt, Artificial Sequence
  RPE65 RNA guide
uccugucuauacucuucccuau

SEQ ID NO: 37443 - RNA, 22 nt, Artificial Sequence
  RPE65 RNA guide
ucuaacccagcuuggccacaua

SEQ ID NO: 37444 - RNA, 22 nt, Artificial Sequence
  RPE65 RNA guide
ucuaagcuccacaugggcugua

SEQ ID NO: 37445 - RNA, 22 nt, Artificial Sequence
  RPE65 RNA guide
ucuauacucuucccuauguuuc

SEQ ID NO: 37446 - RNA, 22 nt, Artificial Sequence
  RPE65 RNA guide
ucuauaucacaccaugcagccc

SEQ ID NO: 37447 - RNA, 22 nt, Artificial Sequence
  RPE65 RNA guide
ucuauguguccucaucaaguca

SEQ ID NO: 37448 - RNA, 22 nt, Artificial Sequence
  RPE65 RNA guide
ucucaaucucccucuguuacuu

SEQ ID NO: 37449 - RNA, 22 nt, Artificial Sequence
  RPE65 RNA guide
ucucccucuguuacuuuuaugu

SEQ ID NO: 37450 - RNA, 22 nt, Artificial Sequence
  RPE65 RNA guide
ucugaaccucaauuuccucauc

SEQ ID NO: 37451 - RNA, 22 nt, Artificial Sequence
  RPE65 RNA guide
ucugcccugcuuggucacccca

SEQ ID NO: 37452 - RNA, 22 nt, Artificial Sequence
  RPE65 RNA guide
ucuggccaacuaggauucuaac

SEQ ID NO: 37453 - RNA, 22 nt, Artificial Sequence
  RPE65 RNA guide
ucugugagguuuaaaagauaaa

SEQ ID NO: 37454 - RNA, 22 nt, Artificial Sequence
  RPE65 RNA guide
ucuucauguugugcauuuauga

SEQ ID NO: 37455 - RNA, 22 nt, Artificial Sequence
  RPE65 RNA guide
ucuucccuauguuucaaugucc

SEQ ID NO: 37456 - RNA, 22 nt, Artificial Sequence
  RPE65 RNA guide
ucuuggggugaccaagcagggc

SEQ ID NO: 37457 - RNA, 22 nt, Artificial Sequence
  RPE65 RNA guide
ucuuuuaaaccucacagaugag

SEQ ID NO: 37458 - RNA, 22 nt, Artificial Sequence
  RPE65 RNA guide
ugaaacauagggaagaguauag

SEQ ID NO: 37459 - RNA, 22 nt, Artificial Sequence
  RPE65 RNA guide
ugaaccucaauuuccucaucug

SEQ ID NO: 37460 - RNA, 22 nt, Artificial Sequence
  RPE65 RNA guide
ugaacuucccccagggcugcau

SEQ ID NO: 37461 - RNA, 22 nt, Artificial Sequence
  RPE65 RNA guide
ugaacuuucuauaucacaccau

SEQ ID NO: 37462 - RNA, 22 nt, Artificial Sequence
  RPE65 RNA guide
ugaagaauaaaggguuuuauua

SEQ ID NO: 37463 - RNA, 22 nt, Artificial Sequence
  RPE65 RNA guide
ugaaggacauugaaacauaggg

SEQ ID NO: 37464 - RNA, 22 nt, Artificial Sequence
  RPE65 RNA guide
ugaauuauauucuucucaaucu

SEQ ID NO: 37465 - RNA, 22 nt, Artificial Sequence
  RPE65 RNA guide
ugaccaagcagggcagacacaa

SEQ ID NO: 37466 - RNA, 22 nt, Artificial Sequence
  RPE65 RNA guide
ugacuugaugaggacacauaga

SEQ ID NO: 37467 - RNA, 22 nt, Artificial Sequence
  RPE65 RNA guide
ugagcuaauaaaacccuuuauu

SEQ ID NO: 37468 - RNA, 22 nt, Artificial Sequence
  RPE65 RNA guide
ugaggaaauugagguucagagg

SEQ ID NO: 37469 - RNA, 22 nt, Artificial Sequence
  RPE65 RNA guide
ugaggacacauagaauggccau

SEQ ID NO: 37470 - RNA, 22 nt, Artificial Sequence
  RPE65 RNA guide
ugagguucagaggaguuaagug

SEQ ID NO: 37471 - RNA, 22 nt, Artificial Sequence
  RPE65 RNA guide
ugauagguuauaggugaugggg

SEQ ID NO: 37472 - RNA, 22 nt, Artificial Sequence
  RPE65 RNA guide
ugauauagaaaguucauguugu

SEQ ID NO: 37473 - RNA, 22 nt, Artificial Sequence
  RPE65 RNA guide
ugaugaggacacauagaauggc

SEQ ID NO: 37474 - RNA, 22 nt, Artificial Sequence
  RPE65 RNA guide
ugauggggguggggguccuaug

SEQ ID NO: 37475 - RNA, 22 nt, Artificial Sequence
  RPE65 RNA guide
ugauuggcauauguggccaagc

SEQ ID NO: 37476 - RNA, 22 nt, Artificial Sequence
  RPE65 RNA guide
ugauugugacuugaugaggaca

SEQ ID NO: 37477 - RNA, 22 nt, Artificial Sequence
  RPE65 RNA guide
ugcacaacaugaagaauaaagg

SEQ ID NO: 37478 - RNA, 22 nt, Artificial Sequence
  RPE65 RNA guide
ugcagcccugggggaaguucac

SEQ ID NO: 37479 - RNA, 22 nt, Artificial Sequence
  RPE65 RNA guide
ugcauggugugauauagaaagu

SEQ ID NO: 37480 - RNA, 22 nt, Artificial Sequence
  RPE65 RNA guide
ugcauuuaugauugugacuuga

SEQ ID NO: 37481 - RNA, 22 nt, Artificial Sequence
  RPE65 RNA guide
ugccaaucacuuaacuccucug

SEQ ID NO: 37482 - RNA, 22 nt, Artificial Sequence
  RPE65 RNA guide
ugcccugcuuggucaccccaag

SEQ ID NO: 37483 - RNA, 22 nt, Artificial Sequence
  RPE65 RNA guide
ugcuccugucuauacucuuccc

SEQ ID NO: 37484 - RNA, 22 nt, Artificial Sequence
  RPE65 RNA guide
ugcucuggccaacuaggauucu

SEQ ID NO: 37485 - RNA, 22 nt, Artificial Sequence
  RPE65 RNA guide
ugcugaauuauauucuucucaa

SEQ ID NO: 37486 - RNA, 22 nt, Artificial Sequence
  RPE65 RNA guide
ugcuuggucaccccaagaaagu

SEQ ID NO: 37487 - RNA, 22 nt, Artificial Sequence
  RPE65 RNA guide
uggagcuuagaauggccauucu

SEQ ID NO: 37488 - RNA, 22 nt, Artificial Sequence
  RPE65 RNA guide
uggcauauguggccaagcuggg

SEQ ID NO: 37489 - RNA, 22 nt, Artificial Sequence
  RPE65 RNA guide
uggccaacuaggauucuaaccc

SEQ ID NO: 37490 - RNA, 22 nt, Artificial Sequence
  RPE65 RNA guide
uggccaagcuggguuagaaucc

SEQ ID NO: 37491 - RNA, 22 nt, Artificial Sequence
  RPE65 RNA guide
uggccacauaugccaaucacuu

SEQ ID NO: 37492 - RNA, 22 nt, Artificial Sequence
  RPE65 RNA guide
uggccagagcaggacaacauga

SEQ ID NO: 37493 - RNA, 22 nt, Artificial Sequence
  RPE65 RNA guide
uggccauucuaagcuccacaug

SEQ ID NO: 37494 - RNA, 22 nt, Artificial Sequence
  RPE65 RNA guide
uggccauucuauguguccucau

SEQ ID NO: 37495 - RNA, 22 nt, Artificial Sequence
  RPE65 RNA guide
ugggaaaauuccggacauggug

SEQ ID NO: 37496 - RNA, 22 nt, Artificial Sequence
  RPE65 RNA guide
ugggcuguacggauugcuccug

SEQ ID NO: 37497 - RNA, 22 nt, Artificial Sequence
  RPE65 RNA guide
ugggggaaguucacauaggacc

SEQ ID NO: 37498 - RNA, 22 nt, Artificial Sequence
  RPE65 RNA guide
uggggguccuaugugaacuucc

SEQ ID NO: 37499 - RNA, 22 nt, Artificial Sequence
  RPE65 RNA guide
uggggguggggguccuauguga

SEQ ID NO: 37500 - RNA, 22 nt, Artificial Sequence
  RPE65 RNA guide
uggggugaccaagcagggcaga

SEQ ID NO: 37501 - RNA, 22 nt, Artificial Sequence
  RPE65 RNA guide
uggguuagaauccuaguuggcc

SEQ ID NO: 37502 - RNA, 22 nt, Artificial Sequence
  RPE65 RNA guide
uggucaccccaagaaagugagc

SEQ ID NO: 37503 - RNA, 22 nt, Artificial Sequence
  RPE65 RNA guide
uggugugauauagaaaguucau

SEQ ID NO: 37504 - RNA, 22 nt, Artificial Sequence
  RPE65 RNA guide
uguacggauugcuccugucuau

SEQ ID NO: 37505 - RNA, 22 nt, Artificial Sequence
  RPE65 RNA guide
ugucccuugaguuuacguuuuu

SEQ ID NO: 37506 - RNA, 22 nt, Artificial Sequence
  RPE65 RNA guide
uguccggaauuuucccaguaag

SEQ ID NO: 37507 - RNA, 22 nt, Artificial Sequence
  RPE65 RNA guide
uguccucaucaagucacaauca

SEQ ID NO: 37508 - RNA, 22 nt, Artificial Sequence
  RPE65 RNA guide
uguccugcucuggccaacuagg

SEQ ID NO: 37509 - RNA, 22 nt, Artificial Sequence
  RPE65 RNA guide
ugucuauacucuucccuauguu

SEQ ID NO: 37510 - RNA, 22 nt, Artificial Sequence
  RPE65 RNA guide
ugucugcccugcuuggucaccc

SEQ ID NO: 37511 - RNA, 22 nt, Artificial Sequence
  RPE65 RNA guide
ugugaacuucccccagggcugc

SEQ ID NO: 37512 - RNA, 22 nt, Artificial Sequence
  RPE65 RNA guide
ugugacuugaugaggacacaua

SEQ ID NO: 37513 - RNA, 22 nt, Artificial Sequence
  RPE65 RNA guide
ugugauauagaaaguucauguu

SEQ ID NO: 37514 - RNA, 22 nt, Artificial Sequence
  RPE65 RNA guide
ugugcauuuaugauugugacuu

SEQ ID NO: 37515 - RNA, 22 nt, Artificial Sequence
  RPE65 RNA guide
uguggagcuuagaauggccauu

SEQ ID NO: 37516 - RNA, 22 nt, Artificial Sequence
  RPE65 RNA guide
uguggccaagcuggguuagaau

SEQ ID NO: 37517 - RNA, 22 nt, Artificial Sequence
  RPE65 RNA guide
uguguccucaucaagucacaau

SEQ ID NO: 37518 - RNA, 22 nt, Artificial Sequence
  RPE65 RNA guide
ugugucugcccugcuuggucac

SEQ ID NO: 37519 - RNA, 22 nt, Artificial Sequence
  RPE65 RNA guide
uguuguccugcucuggccaacu

SEQ ID NO: 37520 - RNA, 22 nt, Artificial Sequence
  RPE65 RNA guide
uguugugcauuuaugauuguga

SEQ ID NO: 37521 - RNA, 22 nt, Artificial Sequence
  RPE65 RNA guide
uuaaaccucacagaugaggaaa

SEQ ID NO: 37522 - RNA, 22 nt, Artificial Sequence
  RPE65 RNA guide
uuaacuccucugaaccucaauu

SEQ ID NO: 37523 - RNA, 22 nt, Artificial Sequence
  RPE65 RNA guide
uuaagugauuggcauauguggc

SEQ ID NO: 37524 - RNA, 22 nt, Artificial Sequence
  RPE65 RNA guide
uuacugggaaaauuccggacau

SEQ ID NO: 37525 - RNA, 22 nt, Artificial Sequence
  RPE65 RNA guide
uuagaauccuaguuggccagag

SEQ ID NO: 37526 - RNA, 22 nt, Artificial Sequence
  RPE65 RNA guide
uuagaauggccauucuaugugu

SEQ ID NO: 37527 - RNA, 22 nt, Artificial Sequence
  RPE65 RNA guide
uuagcucacuuucuugggguga

SEQ ID NO: 37528 - RNA, 22 nt, Artificial Sequence
  RPE65 RNA guide
uuagguugauagguuauaggug

SEQ ID NO: 37529 - RNA, 22 nt, Artificial Sequence
  RPE65 RNA guide
uuauaggugauggggguggggg

SEQ ID NO: 37530 - RNA, 22 nt, Artificial Sequence
  RPE65 RNA guide
uuaucuuuuaaaccucacagau

SEQ ID NO: 37531 - RNA, 22 nt, Artificial Sequence
  RPE65 RNA guide
uuaugauugugacuugaugagg

SEQ ID NO: 37532 - RNA, 22 nt, Artificial Sequence
  RPE65 RNA guide
uuauuagcucacuuucuugggg

SEQ ID NO: 37533 - RNA, 22 nt, Artificial Sequence
  RPE65 RNA guide
uucacauaggacccccaccccc

SEQ ID NO: 37534 - RNA, 22 nt, Artificial Sequence
  RPE65 RNA guide
uucagaggaguuaagugauugg

SEQ ID NO: 37535 - RNA, 22 nt, Artificial Sequence
  RPE65 RNA guide
uucagcacaccauguccggaau

SEQ ID NO: 37536 - RNA, 22 nt, Artificial Sequence
  RPE65 RNA guide
uucauguuguccugcucuggcc

SEQ ID NO: 37537 - RNA, 22 nt, Artificial Sequence
  RPE65 RNA guide
uucauguugugcauuuaugauu

SEQ ID NO: 37538 - RNA, 22 nt, Artificial Sequence
  RPE65 RNA guide
uucccaguaaguuuagguugau

SEQ ID NO: 37539 - RNA, 22 nt, Artificial Sequence
  RPE65 RNA guide
uucccccagggcugcauggugu

SEQ ID NO: 37540 - RNA, 22 nt, Artificial Sequence
  RPE65 RNA guide
uuccggacauggugugcugaau

SEQ ID NO: 37541 - RNA, 22 nt, Artificial Sequence
  RPE65 RNA guide
uuccucaucugugagguuuaaa

SEQ ID NO: 37542 - RNA, 22 nt, Artificial Sequence
  RPE65 RNA guide
uucuaacccagcuuggccacau

SEQ ID NO: 37543 - RNA, 22 nt, Artificial Sequence
  RPE65 RNA guide
uucuaagcuccacaugggcugu

SEQ ID NO: 37544 - RNA, 22 nt, Artificial Sequence
  RPE65 RNA guide
uucuauaucacaccaugcagcc

SEQ ID NO: 37545 - RNA, 22 nt, Artificial Sequence
  RPE65 RNA guide
uucuauguguccucaucaaguc

SEQ ID NO: 37546 - RNA, 22 nt, Artificial Sequence
  RPE65 RNA guide
uucucaaucucccucuguuacu

SEQ ID NO: 37547 - RNA, 22 nt, Artificial Sequence
  RPE65 RNA guide
uucuucauguugugcauuuaug

SEQ ID NO: 37548 - RNA, 22 nt, Artificial Sequence
  RPE65 RNA guide
uucuuggggugaccaagcaggg

SEQ ID NO: 37549 - RNA, 22 nt, Artificial Sequence
  RPE65 RNA guide
uugaaacauagggaagaguaua

SEQ ID NO: 37550 - RNA, 22 nt, Artificial Sequence
  RPE65 RNA guide
uugagaagaauauaauucagca

SEQ ID NO: 37551 - RNA, 22 nt, Artificial Sequence
  RPE65 RNA guide
uugagguucagaggaguuaagu

SEQ ID NO: 37552 - RNA, 22 nt, Artificial Sequence
  RPE65 RNA guide
uugauagguuauaggugauggg

SEQ ID NO: 37553 - RNA, 22 nt, Artificial Sequence
  RPE65 RNA guide
uugaugaggacacauagaaugg

SEQ ID NO: 37554 - RNA, 22 nt, Artificial Sequence
  RPE65 RNA guide
uugcuccugucuauacucuucc

SEQ ID NO: 37555 - RNA, 22 nt, Artificial Sequence
  RPE65 RNA guide
uuggcauauguggccaagcugg

SEQ ID NO: 37556 - RNA, 22 nt, Artificial Sequence
  RPE65 RNA guide
uuggccacauaugccaaucacu

SEQ ID NO: 37557 - RNA, 22 nt, Artificial Sequence
  RPE65 RNA guide
uuggccagagcaggacaacaug

SEQ ID NO: 37558 - RNA, 22 nt, Artificial Sequence
  RPE65 RNA guide
uuggggugaccaagcagggcag

SEQ ID NO: 37559 - RNA, 22 nt, Artificial Sequence
  RPE65 RNA guide
uuggucaccccaagaaagugag

SEQ ID NO: 37560 - RNA, 22 nt, Artificial Sequence
  RPE65 RNA guide
uuguccugcucuggccaacuag

SEQ ID NO: 37561 - RNA, 22 nt, Artificial Sequence
  RPE65 RNA guide
uugugacuugaugaggacacau

SEQ ID NO: 37562 - RNA, 22 nt, Artificial Sequence
  RPE65 RNA guide
uugugcauuuaugauugugacu

SEQ ID NO: 37563 - RNA, 22 nt, Artificial Sequence
  RPE65 RNA guide
uugugucugcccugcuugguca

SEQ ID NO: 37564 - RNA, 22 nt, Artificial Sequence
  RPE65 RNA guide
uuuaaaccucacagaugaggaa

SEQ ID NO: 37565 - RNA, 22 nt, Artificial Sequence
  RPE65 RNA guide
uuuagguugauagguuauaggu

SEQ ID NO: 37566 - RNA, 22 nt, Artificial Sequence
  RPE65 RNA guide
uuuaucuuuuaaaccucacaga

SEQ ID NO: 37567 - RNA, 22 nt, Artificial Sequence
  RPE65 RNA guide
uuuaugauugugacuugaugag

SEQ ID NO: 37568 - RNA, 22 nt, Artificial Sequence
  RPE65 RNA guide
uuuauuagcucacuuucuuggg

SEQ ID NO: 37569 - RNA, 22 nt, Artificial Sequence
  RPE65 RNA guide
uuucccaguaaguuuagguuga

SEQ ID NO: 37570 - RNA, 22 nt, Artificial Sequence
  RPE65 RNA guide
uuuccucaucugugagguuuaa

SEQ ID NO: 37571 - RNA, 22 nt, Artificial Sequence
  RPE65 RNA guide
uuucuauaucacaccaugcagc

SEQ ID NO: 37572 - RNA, 22 nt, Artificial Sequence
  RPE65 RNA guide
uuucuuggggugaccaagcagg

SEQ ID NO: 37573 - RNA, 22 nt, Artificial Sequence
  RPE65 RNA guide
uuuuaaaccucacagaugagga

SEQ ID NO: 37574 - RNA, 22 nt, Artificial Sequence
  RPE65 RNA guide
uuuuauuagcucacuuucuugg

SEQ ID NO: 37575 - RNA, 22 nt, Artificial Sequence
  RPE65 RNA guide
uuuucccaguaaguuuagguug

SEQ ID NO: 37576 - RNA, 20 nt, Artificial Sequence
  RPE65 RNA guide
aacauucaguuuggguucag

SEQ ID NO: 37577 - RNA, 20 nt, Artificial Sequence
  RPE65 RNA guide
aacccaaacugaauguuacu

SEQ ID NO: 37578 - RNA, 20 nt, Artificial Sequence
  RPE65 RNA guide
aagccaugagagaaaaaggg

SEQ ID NO: 37579 - RNA, 20 nt, Artificial Sequence
  RPE65 RNA guide
acccaaacugaauguuacuc

SEQ ID NO: 37580 - RNA, 20 nt, Artificial Sequence
  RPE65 RNA guide
acucaagacauuuuauauua

SEQ ID NO: 37581 - RNA, 20 nt, Artificial Sequence
  RPE65 RNA guide
acugaacccaaacugaaugu

SEQ ID NO: 37582 - RNA, 20 nt, Artificial Sequence
  RPE65 RNA guide
agccaugagagaaaaagggc

SEQ ID NO: 37583 - RNA, 20 nt, Artificial Sequence
  RPE65 RNA guide
agcccuuuuucucucauggc

SEQ ID NO: 37584 - RNA, 20 nt, Artificial Sequence
  RPE65 RNA guide
agggcuaauauaaaaugucu

SEQ ID NO: 37585 - RNA, 20 nt, Artificial Sequence
  RPE65 RNA guide
aguaacauucaguuuggguu

SEQ ID NO: 37586 - RNA, 20 nt, Artificial Sequence
  RPE65 RNA guide
aguaauuuucaagccaugag

SEQ ID NO: 37587 - RNA, 20 nt, Artificial Sequence
  RPE65 RNA guide
aguccaguaauuuucaagcc

SEQ ID NO: 37588 - RNA, 20 nt, Artificial Sequence
  RPE65 RNA guide
auauuagcccuuuuucucuc

SEQ ID NO: 37589 - RNA, 20 nt, Artificial Sequence
  RPE65 RNA guide
auggcuugaaaauuacugga

SEQ ID NO: 37590 - RNA, 20 nt, Artificial Sequence
  RPE65 RNA guide
augucuugaguaacauucag

SEQ ID NO: 37591 - RNA, 20 nt, Artificial Sequence
  RPE65 RNA guide
auuagcccuuuuucucucau

SEQ ID NO: 37592 - RNA, 20 nt, Artificial Sequence
  RPE65 RNA guide
auuuucaagccaugagagaa

SEQ ID NO: 37593 - RNA, 20 nt, Artificial Sequence
  RPE65 RNA guide
caaacugaauguuacucaag

SEQ ID NO: 37594 - RNA, 20 nt, Artificial Sequence
  RPE65 RNA guide
caagccaugagagaaaaagg

SEQ ID NO: 37595 - RNA, 20 nt, Artificial Sequence
  RPE65 RNA guide
caguaauuuucaagccauga

SEQ ID NO: 37596 - RNA, 20 nt, Artificial Sequence
  RPE65 RNA guide
caguccaguaauuuucaagc

SEQ ID NO: 37597 - RNA, 20 nt, Artificial Sequence
  RPE65 RNA guide
caugagagaaaaagggcuaa

SEQ ID NO: 37598 - RNA, 20 nt, Artificial Sequence
  RPE65 RNA guide
cauggcuugaaaauuacugg

SEQ ID NO: 37599 - RNA, 20 nt, Artificial Sequence
  RPE65 RNA guide
ccaaacugaauguuacucaa

SEQ ID NO: 37600 - RNA, 20 nt, Artificial Sequence
  RPE65 RNA guide
ccaguaauuuucaagccaug

SEQ ID NO: 37601 - RNA, 20 nt, Artificial Sequence
  RPE65 RNA guide
ccaugagagaaaaagggcua

SEQ ID NO: 37602 - RNA, 20 nt, Artificial Sequence
  RPE65 RNA guide
cccaaacugaauguuacuca

SEQ ID NO: 37603 - RNA, 20 nt, Artificial Sequence
  RPE65 RNA guide
cccuuuuucucucauggcuu

SEQ ID NO: 37604 - RNA, 20 nt, Artificial Sequence
  RPE65 RNA guide
ccuuuuucucucauggcuug

SEQ ID NO: 37605 - RNA, 20 nt, Artificial Sequence
  RPE65 RNA guide
cucaagacauuuuauauuag

SEQ ID NO: 37606 - RNA, 20 nt, Artificial Sequence
  RPE65 RNA guide
cucauggcuugaaaauuacu

SEQ ID NO: 37607 - RNA, 20 nt, Artificial Sequence
  RPE65 RNA guide
cucucauggcuugaaaauua

SEQ ID NO: 37608 - RNA, 20 nt, Artificial Sequence
  RPE65 RNA guide
cugaacccaaacugaauguu

SEQ ID NO: 37609 - RNA, 20 nt, Artificial Sequence
  RPE65 RNA guide
cuugaguaacauucaguuug

SEQ ID NO: 37610 - RNA, 20 nt, Artificial Sequence
  RPE65 RNA guide
cuuuuucucucauggcuuga

SEQ ID NO: 37611 - RNA, 20 nt, Artificial Sequence
  RPE65 RNA guide
gaacccaaacugaauguuac

SEQ ID NO: 37612 - RNA, 20 nt, Artificial Sequence
  RPE65 RNA guide
gaguaacauucaguuugggu

SEQ ID NO: 37613 - RNA, 20 nt, Artificial Sequence
  RPE65 RNA guide
gccaugagagaaaaagggcu

SEQ ID NO: 37614 - RNA, 20 nt, Artificial Sequence
  RPE65 RNA guide
gcccuuuuucucucauggcu

SEQ ID NO: 37615 - RNA, 20 nt, Artificial Sequence
  RPE65 RNA guide
gcuugaaaauuacuggacug

SEQ ID NO: 37616 - RNA, 20 nt, Artificial Sequence
  RPE65 RNA guide
ggcuugaaaauuacuggacu

SEQ ID NO: 37617 - RNA, 20 nt, Artificial Sequence
  RPE65 RNA guide
gggcuaauauaaaaugucuu

SEQ ID NO: 37618 - RNA, 20 nt, Artificial Sequence
  RPE65 RNA guide
guaacauucaguuuggguuc

SEQ ID NO: 37619 - RNA, 20 nt, Artificial Sequence
  RPE65 RNA guide
guaauuuucaagccaugaga

SEQ ID NO: 37620 - RNA, 20 nt, Artificial Sequence
  RPE65 RNA guide
guccaguaauuuucaagcca

SEQ ID NO: 37621 - RNA, 20 nt, Artificial Sequence
  RPE65 RNA guide
gucuugaguaacauucaguu

SEQ ID NO: 37622 - RNA, 20 nt, Artificial Sequence
  RPE65 RNA guide
guuacugaacccaaacugaa

SEQ ID NO: 37623 - RNA, 20 nt, Artificial Sequence
  RPE65 RNA guide
uaacauucaguuuggguuca

SEQ ID NO: 37624 - RNA, 20 nt, Artificial Sequence
  RPE65 RNA guide
uacugaacccaaacugaaug

SEQ ID NO: 37625 - RNA, 20 nt, Artificial Sequence
  RPE65 RNA guide
uagcccuuuuucucucaugg

SEQ ID NO: 37626 - RNA, 20 nt, Artificial Sequence
  RPE65 RNA guide
uauauuagcccuuuuucucu

SEQ ID NO: 37627 - RNA, 20 nt, Artificial Sequence
  RPE65 RNA guide
uauuagcccuuuuucucuca

SEQ ID NO: 37628 - RNA, 20 nt, Artificial Sequence
  RPE65 RNA guide
ucaagccaugagagaaaaag

SEQ ID NO: 37629 - RNA, 20 nt, Artificial Sequence
  RPE65 RNA guide
ucaguccaguaauuuucaag

SEQ ID NO: 37630 - RNA, 20 nt, Artificial Sequence
  RPE65 RNA guide
ucauggcuugaaaauuacug

SEQ ID NO: 37631 - RNA, 20 nt, Artificial Sequence
  RPE65 RNA guide
uccaguaauuuucaagccau

SEQ ID NO: 37632 - RNA, 20 nt, Artificial Sequence
  RPE65 RNA guide
ucucauggcuugaaaauuac

SEQ ID NO: 37633 - RNA, 20 nt, Artificial Sequence
  RPE65 RNA guide
ucucucauggcuugaaaauu

SEQ ID NO: 37634 - RNA, 20 nt, Artificial Sequence
  RPE65 RNA guide
ucuugaguaacauucaguuu

SEQ ID NO: 37635 - RNA, 20 nt, Artificial Sequence
  RPE65 RNA guide
ugaacccaaacugaauguua

SEQ ID NO: 37636 - RNA, 20 nt, Artificial Sequence
  RPE65 RNA guide
ugaguaacauucaguuuggg

SEQ ID NO: 37637 - RNA, 20 nt, Artificial Sequence
  RPE65 RNA guide
uggcuugaaaauuacuggac

SEQ ID NO: 37638 - RNA, 20 nt, Artificial Sequence
  RPE65 RNA guide
ugucuugaguaacauucagu

SEQ ID NO: 37639 - RNA, 20 nt, Artificial Sequence
  RPE65 RNA guide
uuacugaacccaaacugaau

SEQ ID NO: 37640 - RNA, 20 nt, Artificial Sequence
  RPE65 RNA guide
uuagcccuuuuucucucaug

SEQ ID NO: 37641 - RNA, 20 nt, Artificial Sequence
  RPE65 RNA guide
uucaagccaugagagaaaaa

SEQ ID NO: 37642 - RNA, 20 nt, Artificial Sequence
  RPE65 RNA guide
uucaguccaguaauuuucaa

SEQ ID NO: 37643 - RNA, 20 nt, Artificial Sequence
  RPE65 RNA guide
uucucucauggcuugaaaau

SEQ ID NO: 37644 - RNA, 20 nt, Artificial Sequence
  RPE65 RNA guide
uugaguaacauucaguuugg

SEQ ID NO: 37645 - RNA, 20 nt, Artificial Sequence
  RPE65 RNA guide
uuucaagccaugagagaaaa

SEQ ID NO: 37646 - RNA, 20 nt, Artificial Sequence
  RPE65 RNA guide
uuucaguccaguaauuuuca

SEQ ID NO: 37647 - RNA, 20 nt, Artificial Sequence
  RPE65 RNA guide
uuucucucauggcuugaaaa

SEQ ID NO: 37648 - RNA, 20 nt, Artificial Sequence
  RPE65 RNA guide
uuuucaagccaugagagaaa

SEQ ID NO: 37649 - RNA, 20 nt, Artificial Sequence
  RPE65 RNA guide
uuuucaguccaguaauuuuc

SEQ ID NO: 37650 - RNA, 21 nt, Artificial Sequence
  RPE65 RNA guide
aacccaaacugaauguuacuc

SEQ ID NO: 37651 - RNA, 21 nt, Artificial Sequence
  RPE65 RNA guide
aagccaugagagaaaaagggc

SEQ ID NO: 37652 - RNA, 21 nt, Artificial Sequence
  RPE65 RNA guide
aagggcuaauauaaaaugucu

SEQ ID NO: 37653 - RNA, 21 nt, Artificial Sequence
  RPE65 RNA guide
aaugucuugaguaacauucag

SEQ ID NO: 37654 - RNA, 21 nt, Artificial Sequence
  RPE65 RNA guide
aauuuucaagccaugagagaa

SEQ ID NO: 37655 - RNA, 21 nt, Artificial Sequence
  RPE65 RNA guide
acccaaacugaauguuacuca

SEQ ID NO: 37656 - RNA, 21 nt, Artificial Sequence
  RPE65 RNA guide
acucaagacauuuuauauuag

SEQ ID NO: 37657 - RNA, 21 nt, Artificial Sequence
  RPE65 RNA guide
acugaacccaaacugaauguu

SEQ ID NO: 37658 - RNA, 21 nt, Artificial Sequence
  RPE65 RNA guide
agccaugagagaaaaagggcu

SEQ ID NO: 37659 - RNA, 21 nt, Artificial Sequence
  RPE65 RNA guide
agcccuuuuucucucauggcu

SEQ ID NO: 37660 - RNA, 21 nt, Artificial Sequence
  RPE65 RNA guide
agggcuaauauaaaaugucuu

SEQ ID NO: 37661 - RNA, 21 nt, Artificial Sequence
  RPE65 RNA guide
aguaacauucaguuuggguuc

SEQ ID NO: 37662 - RNA, 21 nt, Artificial Sequence
  RPE65 RNA guide
aguaauuuucaagccaugaga

SEQ ID NO: 37663 - RNA, 21 nt, Artificial Sequence
  RPE65 RNA guide
aguccaguaauuuucaagcca

SEQ ID NO: 37664 - RNA, 21 nt, Artificial Sequence
  RPE65 RNA guide
auauuagcccuuuuucucuca

SEQ ID NO: 37665 - RNA, 21 nt, Artificial Sequence
  RPE65 RNA guide
auggcuugaaaauuacuggac

SEQ ID NO: 37666 - RNA, 21 nt, Artificial Sequence
  RPE65 RNA guide
augucuugaguaacauucagu

SEQ ID NO: 37667 - RNA, 21 nt, Artificial Sequence
  RPE65 RNA guide
auuagcccuuuuucucucaug

SEQ ID NO: 37668 - RNA, 21 nt, Artificial Sequence
  RPE65 RNA guide
auuuucaagccaugagagaaa

SEQ ID NO: 37669 - RNA, 21 nt, Artificial Sequence
  RPE65 RNA guide
caaacugaauguuacucaaga

SEQ ID NO: 37670 - RNA, 21 nt, Artificial Sequence
  RPE65 RNA guide
caagccaugagagaaaaaggg

SEQ ID NO: 37671 - RNA, 21 nt, Artificial Sequence
  RPE65 RNA guide
caguaauuuucaagccaugag

SEQ ID NO: 37672 - RNA, 21 nt, Artificial Sequence
  RPE65 RNA guide
caguccaguaauuuucaagcc

SEQ ID NO: 37673 - RNA, 21 nt, Artificial Sequence
  RPE65 RNA guide
caugagagaaaaagggcuaau

SEQ ID NO: 37674 - RNA, 21 nt, Artificial Sequence
  RPE65 RNA guide
cauggcuugaaaauuacugga

SEQ ID NO: 37675 - RNA, 21 nt, Artificial Sequence
  RPE65 RNA guide
ccaaacugaauguuacucaag

SEQ ID NO: 37676 - RNA, 21 nt, Artificial Sequence
  RPE65 RNA guide
ccaguaauuuucaagccauga

SEQ ID NO: 37677 - RNA, 21 nt, Artificial Sequence
  RPE65 RNA guide
ccaugagagaaaaagggcuaa

SEQ ID NO: 37678 - RNA, 21 nt, Artificial Sequence
  RPE65 RNA guide
cccaaacugaauguuacucaa

SEQ ID NO: 37679 - RNA, 21 nt, Artificial Sequence
  RPE65 RNA guide
cccuuuuucucucauggcuug

SEQ ID NO: 37680 - RNA, 21 nt, Artificial Sequence
  RPE65 RNA guide
ccuuuuucucucauggcuuga

SEQ ID NO: 37681 - RNA, 21 nt, Artificial Sequence
  RPE65 RNA guide
cucaagacauuuuauauuagc

SEQ ID NO: 37682 - RNA, 21 nt, Artificial Sequence
  RPE65 RNA guide
cucauggcuugaaaauuacug

SEQ ID NO: 37683 - RNA, 21 nt, Artificial Sequence
  RPE65 RNA guide
cucucauggcuugaaaauuac

SEQ ID NO: 37684 - RNA, 21 nt, Artificial Sequence
  RPE65 RNA guide
cugaacccaaacugaauguua

SEQ ID NO: 37685 - RNA, 21 nt, Artificial Sequence
  RPE65 RNA guide
cuggacugaaaaauucauuug

SEQ ID NO: 37686 - RNA, 21 nt, Artificial Sequence
  RPE65 RNA guide
cuugaguaacauucaguuugg

SEQ ID NO: 37687 - RNA, 21 nt, Artificial Sequence
  RPE65 RNA guide
cuuuuucucucauggcuugaa

SEQ ID NO: 37688 - RNA, 21 nt, Artificial Sequence
  RPE65 RNA guide
gaaacaaaugaauuuuucagu

SEQ ID NO: 37689 - RNA, 21 nt, Artificial Sequence
  RPE65 RNA guide
gaacccaaacugaauguuacu

SEQ ID NO: 37690 - RNA, 21 nt, Artificial Sequence
  RPE65 RNA guide
gaguaacauucaguuuggguu

SEQ ID NO: 37691 - RNA, 21 nt, Artificial Sequence
  RPE65 RNA guide
gccaugagagaaaaagggcua

SEQ ID NO: 37692 - RNA, 21 nt, Artificial Sequence
  RPE65 RNA guide
gcccuuuuucucucauggcuu

SEQ ID NO: 37693 - RNA, 21 nt, Artificial Sequence
  RPE65 RNA guide
gcuugaaaauuacuggacuga

SEQ ID NO: 37694 - RNA, 21 nt, Artificial Sequence
  RPE65 RNA guide
ggcuugaaaauuacuggacug

SEQ ID NO: 37695 - RNA, 21 nt, Artificial Sequence
  RPE65 RNA guide
gggcuaauauaaaaugucuug

SEQ ID NO: 37696 - RNA, 21 nt, Artificial Sequence
  RPE65 RNA guide
guaacauucaguuuggguuca

SEQ ID NO: 37697 - RNA, 21 nt, Artificial Sequence
  RPE65 RNA guide
guaauuuucaagccaugagag

SEQ ID NO: 37698 - RNA, 21 nt, Artificial Sequence
  RPE65 RNA guide
guccaguaauuuucaagccau

SEQ ID NO: 37699 - RNA, 21 nt, Artificial Sequence
  RPE65 RNA guide
gucuugaguaacauucaguuu

SEQ ID NO: 37700 - RNA, 21 nt, Artificial Sequence
  RPE65 RNA guide
guuacugaacccaaacugaau

SEQ ID NO: 37701 - RNA, 21 nt, Artificial Sequence
  RPE65 RNA guide
uaacauucaguuuggguucag

SEQ ID NO: 37702 - RNA, 21 nt, Artificial Sequence
  RPE65 RNA guide
uacucaagacauuuuauauua

SEQ ID NO: 37703 - RNA, 21 nt, Artificial Sequence
  RPE65 RNA guide
uacugaacccaaacugaaugu

SEQ ID NO: 37704 - RNA, 21 nt, Artificial Sequence
  RPE65 RNA guide
uagcccuuuuucucucauggc

SEQ ID NO: 37705 - RNA, 21 nt, Artificial Sequence
  RPE65 RNA guide
uauauuagcccuuuuucucuc

SEQ ID NO: 37706 - RNA, 21 nt, Artificial Sequence
  RPE65 RNA guide
uauuagcccuuuuucucucau

SEQ ID NO: 37707 - RNA, 21 nt, Artificial Sequence
  RPE65 RNA guide
ucaagccaugagagaaaaagg

SEQ ID NO: 37708 - RNA, 21 nt, Artificial Sequence
  RPE65 RNA guide
ucaguccaguaauuuucaagc

SEQ ID NO: 37709 - RNA, 21 nt, Artificial Sequence
  RPE65 RNA guide
ucauggcuugaaaauuacugg

SEQ ID NO: 37710 - RNA, 21 nt, Artificial Sequence
  RPE65 RNA guide
uccaguaauuuucaagccaug

SEQ ID NO: 37711 - RNA, 21 nt, Artificial Sequence
  RPE65 RNA guide
ucucauggcuugaaaauuacu

SEQ ID NO: 37712 - RNA, 21 nt, Artificial Sequence
  RPE65 RNA guide
ucucucauggcuugaaaauua

SEQ ID NO: 37713 - RNA, 21 nt, Artificial Sequence
  RPE65 RNA guide
ucuugaguaacauucaguuug

SEQ ID NO: 37714 - RNA, 21 nt, Artificial Sequence
  RPE65 RNA guide
ugaacccaaacugaauguuac

SEQ ID NO: 37715 - RNA, 21 nt, Artificial Sequence
  RPE65 RNA guide
ugaguaacauucaguuugggu

SEQ ID NO: 37716 - RNA, 21 nt, Artificial Sequence
  RPE65 RNA guide
uggcuugaaaauuacuggacu

SEQ ID NO: 37717 - RNA, 21 nt, Artificial Sequence
  RPE65 RNA guide
ugucuugaguaacauucaguu

SEQ ID NO: 37718 - RNA, 21 nt, Artificial Sequence
  RPE65 RNA guide
uuacugaacccaaacugaaug

SEQ ID NO: 37719 - RNA, 21 nt, Artificial Sequence
  RPE65 RNA guide
uuagcccuuuuucucucaugg

SEQ ID NO: 37720 - RNA, 21 nt, Artificial Sequence
  RPE65 RNA guide
uuauauuagcccuuuuucucu

SEQ ID NO: 37721 - RNA, 21 nt, Artificial Sequence
  RPE65 RNA guide
uucaagccaugagagaaaaag

SEQ ID NO: 37722 - RNA, 21 nt, Artificial Sequence
  RPE65 RNA guide
uucaguccaguaauuuucaag

SEQ ID NO: 37723 - RNA, 21 nt, Artificial Sequence
  RPE65 RNA guide
uucucucauggcuugaaaauu

SEQ ID NO: 37724 - RNA, 21 nt, Artificial Sequence
  RPE65 RNA guide
uugaguaacauucaguuuggg

SEQ ID NO: 37725 - RNA, 21 nt, Artificial Sequence
  RPE65 RNA guide
uuucaagccaugagagaaaaa

SEQ ID NO: 37726 - RNA, 21 nt, Artificial Sequence
  RPE65 RNA guide
uuucaguccaguaauuuucaa

SEQ ID NO: 37727 - RNA, 21 nt, Artificial Sequence
  RPE65 RNA guide
uuucucucauggcuugaaaau

SEQ ID NO: 37728 - RNA, 21 nt, Artificial Sequence
  RPE65 RNA guide
uuuucaagccaugagagaaaa

SEQ ID NO: 37729 - RNA, 21 nt, Artificial Sequence
  RPE65 RNA guide
uuuucaguccaguaauuuuca

SEQ ID NO: 37730 - RNA, 21 nt, Artificial Sequence
  RPE65 RNA guide
uuuucucucauggcuugaaaa

SEQ ID NO: 37731 - RNA, 21 nt, Artificial Sequence
  RPE65 RNA guide
uuuuucaguccaguaauuuuc

SEQ ID NO: 37732 - RNA, 22 nt, Artificial Sequence
  RPE65 RNA guide
aaagggcuaauauaaaaugucu

SEQ ID NO: 37733 - RNA, 22 nt, Artificial Sequence
  RPE65 RNA guide
aaaugucuugaguaacauucag

SEQ ID NO: 37734 - RNA, 22 nt, Artificial Sequence
  RPE65 RNA guide
aacccaaacugaauguuacuca

SEQ ID NO: 37735 - RNA, 22 nt, Artificial Sequence
  RPE65 RNA guide
aagccaugagagaaaaagggcu

SEQ ID NO: 37736 - RNA, 22 nt, Artificial Sequence
  RPE65 RNA guide
aagggcuaauauaaaaugucuu

SEQ ID NO: 37737 - RNA, 22 nt, Artificial Sequence
  RPE65 RNA guide
aaugucuugaguaacauucagu

SEQ ID NO: 37738 - RNA, 22 nt, Artificial Sequence
  RPE65 RNA guide
aauuuucaagccaugagagaaa

SEQ ID NO: 37739 - RNA, 22 nt, Artificial Sequence
  RPE65 RNA guide
acccaaacugaauguuacucaa

SEQ ID NO: 37740 - RNA, 22 nt, Artificial Sequence
  RPE65 RNA guide
acucaagacauuuuauauuagc

SEQ ID NO: 37741 - RNA, 22 nt, Artificial Sequence
  RPE65 RNA guide
acugaacccaaacugaauguua

SEQ ID NO: 37742 - RNA, 22 nt, Artificial Sequence
  RPE65 RNA guide
acuggacugaaaaauucauuug

SEQ ID NO: 37743 - RNA, 22 nt, Artificial Sequence
  RPE65 RNA guide
agaaacaaaugaauuuuucagu

SEQ ID NO: 37744 - RNA, 22 nt, Artificial Sequence
  RPE65 RNA guide
agccaugagagaaaaagggcua

SEQ ID NO: 37745 - RNA, 22 nt, Artificial Sequence
  RPE65 RNA guide
agcccuuuuucucucauggcuu

SEQ ID NO: 37746 - RNA, 22 nt, Artificial Sequence
  RPE65 RNA guide
agggcuaauauaaaaugucuug

SEQ ID NO: 37747 - RNA, 22 nt, Artificial Sequence
  RPE65 RNA guide
aguaacauucaguuuggguuca

SEQ ID NO: 37748 - RNA, 22 nt, Artificial Sequence
  RPE65 RNA guide
aguaauuuucaagccaugagag

SEQ ID NO: 37749 - RNA, 22 nt, Artificial Sequence
  RPE65 RNA guide
aguccaguaauuuucaagccau

SEQ ID NO: 37750 - RNA, 22 nt, Artificial Sequence
  RPE65 RNA guide
auauuagcccuuuuucucucau

SEQ ID NO: 37751 - RNA, 22 nt, Artificial Sequence
  RPE65 RNA guide
auggcuugaaaauuacuggacu

SEQ ID NO: 37752 - RNA, 22 nt, Artificial Sequence
  RPE65 RNA guide
augucuugaguaacauucaguu

SEQ ID NO: 37753 - RNA, 22 nt, Artificial Sequence
  RPE65 RNA guide
auuagcccuuuuucucucaugg

SEQ ID NO: 37754 - RNA, 22 nt, Artificial Sequence
  RPE65 RNA guide
auuuucaagccaugagagaaaa

SEQ ID NO: 37755 - RNA, 22 nt, Artificial Sequence
  RPE65 RNA guide
auuuuucaguccaguaauuuuc

SEQ ID NO: 37756 - RNA, 22 nt, Artificial Sequence
  RPE65 RNA guide
caaacugaauguuacucaagac

SEQ ID NO: 37757 - RNA, 22 nt, Artificial Sequence
  RPE65 RNA guide
caagccaugagagaaaaagggc

SEQ ID NO: 37758 - RNA, 22 nt, Artificial Sequence
  RPE65 RNA guide
caguaauuuucaagccaugaga

SEQ ID NO: 37759 - RNA, 22 nt, Artificial Sequence
  RPE65 RNA guide
caguccaguaauuuucaagcca

SEQ ID NO: 37760 - RNA, 22 nt, Artificial Sequence
  RPE65 RNA guide
caugagagaaaaagggcuaaua

SEQ ID NO: 37761 - RNA, 22 nt, Artificial Sequence
  RPE65 RNA guide
cauggcuugaaaauuacuggac

SEQ ID NO: 37762 - RNA, 22 nt, Artificial Sequence
  RPE65 RNA guide
cauuuuauauuagcccuuuuuc

SEQ ID NO: 37763 - RNA, 22 nt, Artificial Sequence
  RPE65 RNA guide
ccaaacugaauguuacucaaga

SEQ ID NO: 37764 - RNA, 22 nt, Artificial Sequence
  RPE65 RNA guide
ccaguaauuuucaagccaugag

SEQ ID NO: 37765 - RNA, 22 nt, Artificial Sequence
  RPE65 RNA guide
ccaugagagaaaaagggcuaau

SEQ ID NO: 37766 - RNA, 22 nt, Artificial Sequence
  RPE65 RNA guide
cccaaacugaauguuacucaag

SEQ ID NO: 37767 - RNA, 22 nt, Artificial Sequence
  RPE65 RNA guide
cccuuuuucucucauggcuuga

SEQ ID NO: 37768 - RNA, 22 nt, Artificial Sequence
  RPE65 RNA guide
ccuuuuucucucauggcuugaa

SEQ ID NO: 37769 - RNA, 22 nt, Artificial Sequence
  RPE65 RNA guide
cucaagacauuuuauauuagcc

SEQ ID NO: 37770 - RNA, 22 nt, Artificial Sequence
  RPE65 RNA guide
cucauggcuugaaaauuacugg

SEQ ID NO: 37771 - RNA, 22 nt, Artificial Sequence
  RPE65 RNA guide
cucucauggcuugaaaauuacu

SEQ ID NO: 37772 - RNA, 22 nt, Artificial Sequence
  RPE65 RNA guide
cugaacccaaacugaauguuac

SEQ ID NO: 37773 - RNA, 22 nt, Artificial Sequence
  RPE65 RNA guide
cuggacugaaaaauucauuugu

SEQ ID NO: 37774 - RNA, 22 nt, Artificial Sequence
  RPE65 RNA guide
cuugaguaacauucaguuuggg

SEQ ID NO: 37775 - RNA, 22 nt, Artificial Sequence
  RPE65 RNA guide
cuuuuucucucauggcuugaaa

SEQ ID NO: 37776 - RNA, 22 nt, Artificial Sequence
  RPE65 RNA guide
gaaacaaaugaauuuuucaguc

SEQ ID NO: 37777 - RNA, 22 nt, Artificial Sequence
  RPE65 RNA guide
gaacccaaacugaauguuacuc

SEQ ID NO: 37778 - RNA, 22 nt, Artificial Sequence
  RPE65 RNA guide
gacauuuuauauuagcccuuuu

SEQ ID NO: 37779 - RNA, 22 nt, Artificial Sequence
  RPE65 RNA guide
gagaaaaagggcuaauauaaaa

SEQ ID NO: 37780 - RNA, 22 nt, Artificial Sequence
  RPE65 RNA guide
gagagaaaaagggcuaauauaa

SEQ ID NO: 37781 - RNA, 22 nt, Artificial Sequence
  RPE65 RNA guide
gaguaacauucaguuuggguuc

SEQ ID NO: 37782 - RNA, 22 nt, Artificial Sequence
  RPE65 RNA guide
gccaugagagaaaaagggcuaa

SEQ ID NO: 37783 - RNA, 22 nt, Artificial Sequence
  RPE65 RNA guide
gcccuuuuucucucauggcuug

SEQ ID NO: 37784 - RNA, 22 nt, Artificial Sequence
  RPE65 RNA guide
gcuugaaaauuacuggacugaa

SEQ ID NO: 37785 - RNA, 22 nt, Artificial Sequence
  RPE65 RNA guide
ggacugaaaaauucauuuguuu

SEQ ID NO: 37786 - RNA, 22 nt, Artificial Sequence
  RPE65 RNA guide
ggcuaauauaaaaugucuugag

SEQ ID NO: 37787 - RNA, 22 nt, Artificial Sequence
  RPE65 RNA guide
ggcuugaaaauuacuggacuga

SEQ ID NO: 37788 - RNA, 22 nt, Artificial Sequence
  RPE65 RNA guide
gggcuaauauaaaaugucuuga

SEQ ID NO: 37789 - RNA, 22 nt, Artificial Sequence
  RPE65 RNA guide
guaacauucaguuuggguucag

SEQ ID NO: 37790 - RNA, 22 nt, Artificial Sequence
  RPE65 RNA guide
guaauuuucaagccaugagaga

SEQ ID NO: 37791 - RNA, 22 nt, Artificial Sequence
  RPE65 RNA guide
guagaaacaaaugaauuuuuca

SEQ ID NO: 37792 - RNA, 22 nt, Artificial Sequence
  RPE65 RNA guide
guccaguaauuuucaagccaug

SEQ ID NO: 37793 - RNA, 22 nt, Artificial Sequence
  RPE65 RNA guide
gucuugaguaacauucaguuug

SEQ ID NO: 37794 - RNA, 22 nt, Artificial Sequence
  RPE65 RNA guide
guuacucaagacauuuuauauu

SEQ ID NO: 37795 - RNA, 22 nt, Artificial Sequence
  RPE65 RNA guide
guuacugaacccaaacugaaug

SEQ ID NO: 37796 - RNA, 22 nt, Artificial Sequence
  RPE65 RNA guide
uaauuuucaagccaugagagaa

SEQ ID NO: 37797 - RNA, 22 nt, Artificial Sequence
  RPE65 RNA guide
uacucaagacauuuuauauuag

SEQ ID NO: 37798 - RNA, 22 nt, Artificial Sequence
  RPE65 RNA guide
uacugaacccaaacugaauguu

SEQ ID NO: 37799 - RNA, 22 nt, Artificial Sequence
  RPE65 RNA guide
uagcccuuuuucucucauggcu

SEQ ID NO: 37800 - RNA, 22 nt, Artificial Sequence
  RPE65 RNA guide
uauauuagcccuuuuucucuca

SEQ ID NO: 37801 - RNA, 22 nt, Artificial Sequence
  RPE65 RNA guide
uauuagcccuuuuucucucaug

SEQ ID NO: 37802 - RNA, 22 nt, Artificial Sequence
  RPE65 RNA guide
ucaagccaugagagaaaaaggg

SEQ ID NO: 37803 - RNA, 22 nt, Artificial Sequence
  RPE65 RNA guide
ucaguccaguaauuuucaagcc

SEQ ID NO: 37804 - RNA, 22 nt, Artificial Sequence
  RPE65 RNA guide
ucauggcuugaaaauuacugga

SEQ ID NO: 37805 - RNA, 22 nt, Artificial Sequence
  RPE65 RNA guide
uccaguaauuuucaagccauga

SEQ ID NO: 37806 - RNA, 22 nt, Artificial Sequence
  RPE65 RNA guide
ucucauggcuugaaaauuacug

SEQ ID NO: 37807 - RNA, 22 nt, Artificial Sequence
  RPE65 RNA guide
ucucucauggcuugaaaauuac

SEQ ID NO: 37808 - RNA, 22 nt, Artificial Sequence
  RPE65 RNA guide
ucuugaguaacauucaguuugg

SEQ ID NO: 37809 - RNA, 22 nt, Artificial Sequence
  RPE65 RNA guide
ugaacccaaacugaauguuacu

SEQ ID NO: 37810 - RNA, 22 nt, Artificial Sequence
  RPE65 RNA guide
ugaguaacauucaguuuggguu

SEQ ID NO: 37811 - RNA, 22 nt, Artificial Sequence
  RPE65 RNA guide
uggcuugaaaauuacuggacug

SEQ ID NO: 37812 - RNA, 22 nt, Artificial Sequence
  RPE65 RNA guide
ugucuugaguaacauucaguuu

SEQ ID NO: 37813 - RNA, 22 nt, Artificial Sequence
  RPE65 RNA guide
uuacucaagacauuuuauauua

SEQ ID NO: 37814 - RNA, 22 nt, Artificial Sequence
  RPE65 RNA guide
uuacugaacccaaacugaaugu

SEQ ID NO: 37815 - RNA, 22 nt, Artificial Sequence
  RPE65 RNA guide
uuagcccuuuuucucucauggc

SEQ ID NO: 37816 - RNA, 22 nt, Artificial Sequence
  RPE65 RNA guide
uuauauuagcccuuuuucucuc

SEQ ID NO: 37817 - RNA, 22 nt, Artificial Sequence
  RPE65 RNA guide
uucaagccaugagagaaaaagg

SEQ ID NO: 37818 - RNA, 22 nt, Artificial Sequence
  RPE65 RNA guide
uucaguccaguaauuuucaagc

SEQ ID NO: 37819 - RNA, 22 nt, Artificial Sequence
  RPE65 RNA guide
uucucucauggcuugaaaauua

SEQ ID NO: 37820 - RNA, 22 nt, Artificial Sequence
  RPE65 RNA guide
uugaguaacauucaguuugggu

SEQ ID NO: 37821 - RNA, 22 nt, Artificial Sequence
  RPE65 RNA guide
uuuauauuagcccuuuuucucu

SEQ ID NO: 37822 - RNA, 22 nt, Artificial Sequence
  RPE65 RNA guide
uuucaagccaugagagaaaaag

SEQ ID NO: 37823 - RNA, 22 nt, Artificial Sequence
  RPE65 RNA guide
uuucaguccaguaauuuucaag

SEQ ID NO: 37824 - RNA, 22 nt, Artificial Sequence
  RPE65 RNA guide
uuucucucauggcuugaaaauu

SEQ ID NO: 37825 - RNA, 22 nt, Artificial Sequence
  RPE65 RNA guide
uuuucaagccaugagagaaaaa

SEQ ID NO: 37826 - RNA, 22 nt, Artificial Sequence
  RPE65 RNA guide
uuuucaguccaguaauuuucaa

SEQ ID NO: 37827 - RNA, 22 nt, Artificial Sequence
  RPE65 RNA guide
uuuucucucauggcuugaaaau

SEQ ID NO: 37828 - RNA, 22 nt, Artificial Sequence
  RPE65 RNA guide
uuuuucaguccaguaauuuuca

SEQ ID NO: 37829 - RNA, 22 nt, Artificial Sequence
  RPE65 RNA guide
uuuuucucucauggcuugaaaa

SEQ ID NO: 37830 - RNA, 20 nt, Artificial Sequence
  RPE65 RNA guide
aaaagaacaugagagccaca

SEQ ID NO: 37831 - RNA, 20 nt, Artificial Sequence
  RPE65 RNA guide
aaaagcuaugaaaggcaggg

SEQ ID NO: 37832 - RNA, 20 nt, Artificial Sequence
  RPE65 RNA guide
aaacacuuacauggauugga

SEQ ID NO: 37833 - RNA, 20 nt, Artificial Sequence
  RPE65 RNA guide
aaacuuaauguggcucucau

SEQ ID NO: 37834 - RNA, 20 nt, Artificial Sequence
  RPE65 RNA guide
aaagaacaugagagccacau

SEQ ID NO: 37835 - RNA, 20 nt, Artificial Sequence
  RPE65 RNA guide
aaagcaucauagacagaggc

SEQ ID NO: 37836 - RNA, 20 nt, Artificial Sequence
  RPE65 RNA guide
aaagcuaugaaaggcaggga

SEQ ID NO: 37837 - RNA, 20 nt, Artificial Sequence
  RPE65 RNA guide
aaaggcagggaccauguuac

SEQ ID NO: 37838 - RNA, 20 nt, Artificial Sequence
  RPE65 RNA guide
aaauccuagcauugucaaca

SEQ ID NO: 37839 - RNA, 20 nt, Artificial Sequence
  RPE65 RNA guide
aaauggacugcacugauugc

SEQ ID NO: 37840 - RNA, 20 nt, Artificial Sequence
  RPE65 RNA guide
aaauuacaccaauugcagga

SEQ ID NO: 37841 - RNA, 20 nt, Artificial Sequence
  RPE65 RNA guide
aaauuccugaacaucaccua

SEQ ID NO: 37842 - RNA, 20 nt, Artificial Sequence
  RPE65 RNA guide
aacacuuacauggauuggag

SEQ ID NO: 37843 - RNA, 20 nt, Artificial Sequence
  RPE65 RNA guide
aacaucaccuagcacugugu

SEQ ID NO: 37844 - RNA, 20 nt, Artificial Sequence
  RPE65 RNA guide
aacaugagagccacauuaag

SEQ ID NO: 37845 - RNA, 20 nt, Artificial Sequence
  RPE65 RNA guide
aacauggucccugccuuuca

SEQ ID NO: 37846 - RNA, 20 nt, Artificial Sequence
  RPE65 RNA guide
aaccugguaaauacugggug

SEQ ID NO: 37847 - RNA, 20 nt, Artificial Sequence
  RPE65 RNA guide
aacuuaauguggcucucaug

SEQ ID NO: 37848 - RNA, 20 nt, Artificial Sequence
  RPE65 RNA guide
aacuugaugaggacacacag

SEQ ID NO: 37849 - RNA, 20 nt, Artificial Sequence
  RPE65 RNA guide
aagaaacaauguuuguccua

SEQ ID NO: 37850 - RNA, 20 nt, Artificial Sequence
  RPE65 RNA guide
aagaacaugagagccacauu

SEQ ID NO: 37851 - RNA, 20 nt, Artificial Sequence
  RPE65 RNA guide
aagcacuugauaaguauuug

SEQ ID NO: 37852 - RNA, 20 nt, Artificial Sequence
  RPE65 RNA guide
aagcaucauagacagaggca

SEQ ID NO: 37853 - RNA, 20 nt, Artificial Sequence
  RPE65 RNA guide
aagcuagcaugaaccuggua

SEQ ID NO: 37854 - RNA, 20 nt, Artificial Sequence
  RPE65 RNA guide
aagcuaugaaaggcagggac

SEQ ID NO: 37855 - RNA, 20 nt, Artificial Sequence
  RPE65 RNA guide
aagcuccaaauggacugcac

SEQ ID NO: 37856 - RNA, 20 nt, Artificial Sequence
  RPE65 RNA guide
aaggcagggaccauguuacc

SEQ ID NO: 37857 - RNA, 20 nt, Artificial Sequence
  RPE65 RNA guide
aagggauagaucaaugagua

SEQ ID NO: 37858 - RNA, 20 nt, Artificial Sequence
  RPE65 RNA guide
aaguuagaaucauacauucg

SEQ ID NO: 37859 - RNA, 20 nt, Artificial Sequence
  RPE65 RNA guide
aaguuucaaauccuagcauu

SEQ ID NO: 37860 - RNA, 20 nt, Artificial Sequence
  RPE65 RNA guide
aauagcuagucauuguugac

SEQ ID NO: 37861 - RNA, 20 nt, Artificial Sequence
  RPE65 RNA guide
aaucagugcaguccauuugg

SEQ ID NO: 37862 - RNA, 20 nt, Artificial Sequence
  RPE65 RNA guide
aaucauacauucgcagcaug

SEQ ID NO: 37863 - RNA, 20 nt, Artificial Sequence
  RPE65 RNA guide
aauccuagcauugucaacaa

SEQ ID NO: 37864 - RNA, 20 nt, Artificial Sequence
  RPE65 RNA guide
aaugaccauuccaagcucca

SEQ ID NO: 37865 - RNA, 20 nt, Artificial Sequence
  RPE65 RNA guide
aaugacuagcuauuugacau

SEQ ID NO: 37866 - RNA, 20 nt, Artificial Sequence
  RPE65 RNA guide
aaugaguaggguaacauggu

SEQ ID NO: 37867 - RNA, 20 nt, Artificial Sequence
  RPE65 RNA guide
aauggacugcacugauugcc

SEQ ID NO: 37868 - RNA, 20 nt, Artificial Sequence
  RPE65 RNA guide
aauggucauucugugugucc

SEQ ID NO: 37869 - RNA, 20 nt, Artificial Sequence
  RPE65 RNA guide
aauguggcucucauguucuu

SEQ ID NO: 37870 - RNA, 20 nt, Artificial Sequence
  RPE65 RNA guide
aauguuuguccuaugucaaa

SEQ ID NO: 37871 - RNA, 20 nt, Artificial Sequence
  RPE65 RNA guide
aauuacaccaauugcaggaa

SEQ ID NO: 37872 - RNA, 20 nt, Artificial Sequence
  RPE65 RNA guide
aauuauucaugcugcgaaug

SEQ ID NO: 37873 - RNA, 20 nt, Artificial Sequence
  RPE65 RNA guide
aauuccugaacaucaccuag

SEQ ID NO: 37874 - RNA, 20 nt, Artificial Sequence
  RPE65 RNA guide
aauucuaaauuccugaacau

SEQ ID NO: 37875 - RNA, 20 nt, Artificial Sequence
  RPE65 RNA guide
aauucugaauauggaaagca

SEQ ID NO: 37876 - RNA, 20 nt, Artificial Sequence
  RPE65 RNA guide
aauugcaggaaagcaucaua

SEQ ID NO: 37877 - RNA, 20 nt, Artificial Sequence
  RPE65 RNA guide
aauuuaugcuagaugcaagg

SEQ ID NO: 37878 - RNA, 20 nt, Artificial Sequence
  RPE65 RNA guide
aauuuggugaaaagaacaug

SEQ ID NO: 37879 - RNA, 20 nt, Artificial Sequence
  RPE65 RNA guide
acaaauacuuaucaagugcu

SEQ ID NO: 37880 - RNA, 20 nt, Artificial Sequence
  RPE65 RNA guide
acaaugacuagcuauuugac

SEQ ID NO: 37881 - RNA, 20 nt, Artificial Sequence
  RPE65 RNA guide
acacacagaaugaccauucc

SEQ ID NO: 37882 - RNA, 20 nt, Artificial Sequence
  RPE65 RNA guide
acacagaaugaccauuccaa

SEQ ID NO: 37883 - RNA, 20 nt, Artificial Sequence
  RPE65 RNA guide
acacagugcuaggugauguu

SEQ ID NO: 37884 - RNA, 20 nt, Artificial Sequence
  RPE65 RNA guide
acaccaauugcaggaaagca

SEQ ID NO: 37885 - RNA, 20 nt, Artificial Sequence
  RPE65 RNA guide
acacuuacauggauuggaga

SEQ ID NO: 37886 - RNA, 20 nt, Artificial Sequence
  RPE65 RNA guide
acagaaugaccauuccaagc

SEQ ID NO: 37887 - RNA, 20 nt, Artificial Sequence
  RPE65 RNA guide
acagaggcaaucagugcagu

SEQ ID NO: 37888 - RNA, 20 nt, Artificial Sequence
  RPE65 RNA guide
acagugcuaggugauguuca

SEQ ID NO: 37889 - RNA, 20 nt, Artificial Sequence
  RPE65 RNA guide
acauaggacaaacauuguuu

SEQ ID NO: 37890 - RNA, 20 nt, Artificial Sequence
  RPE65 RNA guide
acaucaccuagcacuguguc

SEQ ID NO: 37891 - RNA, 20 nt, Artificial Sequence
  RPE65 RNA guide
acaugagagccacauuaagu

SEQ ID NO: 37892 - RNA, 20 nt, Artificial Sequence
  RPE65 RNA guide
acauggauuggagagaaccc

SEQ ID NO: 37893 - RNA, 20 nt, Artificial Sequence
  RPE65 RNA guide
acauggucccugccuuucau

SEQ ID NO: 37894 - RNA, 20 nt, Artificial Sequence
  RPE65 RNA guide
accaaauuacaccaauugca

SEQ ID NO: 37895 - RNA, 20 nt, Artificial Sequence
  RPE65 RNA guide
accaauugcaggaaagcauc

SEQ ID NO: 37896 - RNA, 20 nt, Artificial Sequence
  RPE65 RNA guide
accagguucaugcuagcuua

SEQ ID NO: 37897 - RNA, 20 nt, Artificial Sequence
  RPE65 RNA guide
accauguuacccuacucauu

SEQ ID NO: 37898 - RNA, 20 nt, Artificial Sequence
  RPE65 RNA guide
accauuccaagcuccaaaug

SEQ ID NO: 37899 - RNA, 20 nt, Artificial Sequence
  RPE65 RNA guide
acccaguauuuaccagguuc

SEQ ID NO: 37900 - RNA, 20 nt, Artificial Sequence
  RPE65 RNA guide
acccuacucauugaucuauc

SEQ ID NO: 37901 - RNA, 20 nt, Artificial Sequence
  RPE65 RNA guide
acuagcuauuugacauagga

SEQ ID NO: 37902 - RNA, 20 nt, Artificial Sequence
  RPE65 RNA guide
acucauugaucuaucccuug

SEQ ID NO: 37903 - RNA, 20 nt, Artificial Sequence
  RPE65 RNA guide
acugauugccucugucuaug

SEQ ID NO: 37904 - RNA, 20 nt, Artificial Sequence
  RPE65 RNA guide
acugcacugauugccucugu

SEQ ID NO: 37905 - RNA, 20 nt, Artificial Sequence
  RPE65 RNA guide
acuuaauguggcucucaugu

SEQ ID NO: 37906 - RNA, 20 nt, Artificial Sequence
  RPE65 RNA guide
acuuacauggauuggagaga

SEQ ID NO: 37907 - RNA, 20 nt, Artificial Sequence
  RPE65 RNA guide
acuuaucaagugcuuuccau

SEQ ID NO: 37908 - RNA, 20 nt, Artificial Sequence
  RPE65 RNA guide
acuugaugaggacacacaga

SEQ ID NO: 37909 - RNA, 20 nt, Artificial Sequence
  RPE65 RNA guide
agaaacaauguuuguccuau

SEQ ID NO: 37910 - RNA, 20 nt, Artificial Sequence
  RPE65 RNA guide
agaacaugagagccacauua

SEQ ID NO: 37911 - RNA, 20 nt, Artificial Sequence
  RPE65 RNA guide
agaacccauauaaaaugccu

SEQ ID NO: 37912 - RNA, 20 nt, Artificial Sequence
  RPE65 RNA guide
agaaucauacauucgcagca

SEQ ID NO: 37913 - RNA, 20 nt, Artificial Sequence
  RPE65 RNA guide
agaaugaccauuccaagcuc

SEQ ID NO: 37914 - RNA, 20 nt, Artificial Sequence
  RPE65 RNA guide
agaauuuaugcuagaugcaa

SEQ ID NO: 37915 - RNA, 20 nt, Artificial Sequence
  RPE65 RNA guide
agacagaggcaaucagugca

SEQ ID NO: 37916 - RNA, 20 nt, Artificial Sequence
  RPE65 RNA guide
agagaacccauauaaaaugc

SEQ ID NO: 37917 - RNA, 20 nt, Artificial Sequence
  RPE65 RNA guide
agagaugaagaaacaauguu

SEQ ID NO: 37918 - RNA, 20 nt, Artificial Sequence
  RPE65 RNA guide
agagccacauuaaguuucaa

SEQ ID NO: 37919 - RNA, 20 nt, Artificial Sequence
  RPE65 RNA guide
agaggcaaucagugcagucc

SEQ ID NO: 37920 - RNA, 20 nt, Artificial Sequence
  RPE65 RNA guide
agaucaaugaguaggguaac

SEQ ID NO: 37921 - RNA, 20 nt, Artificial Sequence
  RPE65 RNA guide
agaugaagaaacaauguuug

SEQ ID NO: 37922 - RNA, 20 nt, Artificial Sequence
  RPE65 RNA guide
agaugcaagggauagaucaa

SEQ ID NO: 37923 - RNA, 20 nt, Artificial Sequence
  RPE65 RNA guide
agcacccaguauuuaccagg

SEQ ID NO: 37924 - RNA, 20 nt, Artificial Sequence
  RPE65 RNA guide
agcacuugauaaguauuugu

SEQ ID NO: 37925 - RNA, 20 nt, Artificial Sequence
  RPE65 RNA guide
agcaucauagacagaggcaa

SEQ ID NO: 37926 - RNA, 20 nt, Artificial Sequence
  RPE65 RNA guide
agcaugaaccugguaaauac

SEQ ID NO: 37927 - RNA, 20 nt, Artificial Sequence
  RPE65 RNA guide
agcauugucaacaaugacua

SEQ ID NO: 37928 - RNA, 20 nt, Artificial Sequence
  RPE65 RNA guide
agccacauuaaguuucaaau

SEQ ID NO: 37929 - RNA, 20 nt, Artificial Sequence
  RPE65 RNA guide
agcuagcaugaaccugguaa

SEQ ID NO: 37930 - RNA, 20 nt, Artificial Sequence
  RPE65 RNA guide
agcuagucauuguugacaau

SEQ ID NO: 37931 - RNA, 20 nt, Artificial Sequence
  RPE65 RNA guide
agcuaugaaaggcagggacc

SEQ ID NO: 37932 - RNA, 20 nt, Artificial Sequence
  RPE65 RNA guide
agcuauuugacauaggacaa

SEQ ID NO: 37933 - RNA, 20 nt, Artificial Sequence
  RPE65 RNA guide
agcuccaaauggacugcacu

SEQ ID NO: 37934 - RNA, 20 nt, Artificial Sequence
  RPE65 RNA guide
agcuuauaaaagcuaugaaa

SEQ ID NO: 37935 - RNA, 20 nt, Artificial Sequence
  RPE65 RNA guide
agcuuggaauggucauucug

SEQ ID NO: 37936 - RNA, 20 nt, Artificial Sequence
  RPE65 RNA guide
agcuuuuauaagcuagcaug

SEQ ID NO: 37937 - RNA, 20 nt, Artificial Sequence
  RPE65 RNA guide
aggaaagcaucauagacaga

SEQ ID NO: 37938 - RNA, 20 nt, Artificial Sequence
  RPE65 RNA guide
aggacaaacauuguuucuuc

SEQ ID NO: 37939 - RNA, 20 nt, Artificial Sequence
  RPE65 RNA guide
aggacacacagaaugaccau

SEQ ID NO: 37940 - RNA, 20 nt, Artificial Sequence
  RPE65 RNA guide
aggauuugaaacuuaaugug

SEQ ID NO: 37941 - RNA, 20 nt, Artificial Sequence
  RPE65 RNA guide
aggcaaucagugcaguccau

SEQ ID NO: 37942 - RNA, 20 nt, Artificial Sequence
  RPE65 RNA guide
aggcagggaccauguuaccc

SEQ ID NO: 37943 - RNA, 20 nt, Artificial Sequence
  RPE65 RNA guide
aggcauuuuauauggguucu

SEQ ID NO: 37944 - RNA, 20 nt, Artificial Sequence
  RPE65 RNA guide
agggaccauguuacccuacu

SEQ ID NO: 37945 - RNA, 20 nt, Artificial Sequence
  RPE65 RNA guide
agggauagaucaaugaguag

SEQ ID NO: 37946 - RNA, 20 nt, Artificial Sequence
  RPE65 RNA guide
aggguaacauggucccugcc

SEQ ID NO: 37947 - RNA, 20 nt, Artificial Sequence
  RPE65 RNA guide
aggugauguucaggaauuua

SEQ ID NO: 37948 - RNA, 20 nt, Artificial Sequence
  RPE65 RNA guide
agguucaugcuagcuuauaa

SEQ ID NO: 37949 - RNA, 20 nt, Artificial Sequence
  RPE65 RNA guide
aguaggguaacauggucccu

SEQ ID NO: 37950 - RNA, 20 nt, Artificial Sequence
  RPE65 RNA guide
aguauuuaccagguucaugc

SEQ ID NO: 37951 - RNA, 20 nt, Artificial Sequence
  RPE65 RNA guide
agucauuguugacaaugcua

SEQ ID NO: 37952 - RNA, 20 nt, Artificial Sequence
  RPE65 RNA guide
aguccauuuggagcuuggaa

SEQ ID NO: 37953 - RNA, 20 nt, Artificial Sequence
  RPE65 RNA guide
agugcaguccauuuggagcu

SEQ ID NO: 37954 - RNA, 20 nt, Artificial Sequence
  RPE65 RNA guide
agugcuaggugauguucagg

SEQ ID NO: 37955 - RNA, 20 nt, Artificial Sequence
  RPE65 RNA guide
aguuagaaucauacauucgc

SEQ ID NO: 37956 - RNA, 20 nt, Artificial Sequence
  RPE65 RNA guide
aguuucaaauccuagcauug

SEQ ID NO: 37957 - RNA, 20 nt, Artificial Sequence
  RPE65 RNA guide
auaaaagcuaugaaaggcag

SEQ ID NO: 37958 - RNA, 20 nt, Artificial Sequence
  RPE65 RNA guide
auaagcuagcaugaaccugg

SEQ ID NO: 37959 - RNA, 20 nt, Artificial Sequence
  RPE65 RNA guide
auagacagaggcaaucagug

SEQ ID NO: 37960 - RNA, 20 nt, Artificial Sequence
  RPE65 RNA guide
auagaucaaugaguagggua

SEQ ID NO: 37961 - RNA, 20 nt, Artificial Sequence
  RPE65 RNA guide
auagcuagucauuguugaca

SEQ ID NO: 37962 - RNA, 20 nt, Artificial Sequence
  RPE65 RNA guide
auauggguucucuccaaucc

SEQ ID NO: 37963 - RNA, 20 nt, Artificial Sequence
  RPE65 RNA guide
aucaagugcuuuccauauuc

SEQ ID NO: 37964 - RNA, 20 nt, Artificial Sequence
  RPE65 RNA guide
aucaaguuagaaucauacau

SEQ ID NO: 37965 - RNA, 20 nt, Artificial Sequence
  RPE65 RNA guide
aucaaugaguaggguaacau

SEQ ID NO: 37966 - RNA, 20 nt, Artificial Sequence
  RPE65 RNA guide
aucagugcaguccauuugga

SEQ ID NO: 37967 - RNA, 20 nt, Artificial Sequence
  RPE65 RNA guide
aucauacauucgcagcauga

SEQ ID NO: 37968 - RNA, 20 nt, Artificial Sequence
  RPE65 RNA guide
aucauagacagaggcaauca

SEQ ID NO: 37969 - RNA, 20 nt, Artificial Sequence
  RPE65 RNA guide
aucccuugcaucuagcauaa

SEQ ID NO: 37970 - RNA, 20 nt, Artificial Sequence
  RPE65 RNA guide
auccuagcauugucaacaau

SEQ ID NO: 37971 - RNA, 20 nt, Artificial Sequence
  RPE65 RNA guide
aucuaucccuugcaucuagc

SEQ ID NO: 37972 - RNA, 20 nt, Artificial Sequence
  RPE65 RNA guide
augaaaggcagggaccaugu

SEQ ID NO: 37973 - RNA, 20 nt, Artificial Sequence
  RPE65 RNA guide
augaaccugguaaauacugg

SEQ ID NO: 37974 - RNA, 20 nt, Artificial Sequence
  RPE65 RNA guide
augacacaaauacuuaucaa

SEQ ID NO: 37975 - RNA, 20 nt, Artificial Sequence
  RPE65 RNA guide
augaccauuccaagcuccaa

SEQ ID NO: 37976 - RNA, 20 nt, Artificial Sequence
  RPE65 RNA guide
augacuagcuauuugacaua

SEQ ID NO: 37977 - RNA, 20 nt, Artificial Sequence
  RPE65 RNA guide
augagagccacauuaaguuu

SEQ ID NO: 37978 - RNA, 20 nt, Artificial Sequence
  RPE65 RNA guide
augaggacacacagaaugac

SEQ ID NO: 37979 - RNA, 20 nt, Artificial Sequence
  RPE65 RNA guide
augaguaggguaacaugguc

SEQ ID NO: 37980 - RNA, 20 nt, Artificial Sequence
  RPE65 RNA guide
augaugcuuuccugcaauug

SEQ ID NO: 37981 - RNA, 20 nt, Artificial Sequence
  RPE65 RNA guide
augauucuaacuugaugagg

SEQ ID NO: 37982 - RNA, 20 nt, Artificial Sequence
  RPE65 RNA guide
augcaagggauagaucaaug

SEQ ID NO: 37983 - RNA, 20 nt, Artificial Sequence
  RPE65 RNA guide
augcuagaugcaagggauag

SEQ ID NO: 37984 - RNA, 20 nt, Artificial Sequence
  RPE65 RNA guide
augcugcgaauguaugauuc

SEQ ID NO: 37985 - RNA, 20 nt, Artificial Sequence
  RPE65 RNA guide
augcuuuccugcaauuggug

SEQ ID NO: 37986 - RNA, 20 nt, Artificial Sequence
  RPE65 RNA guide
auggacugcacugauugccu

SEQ ID NO: 37987 - RNA, 20 nt, Artificial Sequence
  RPE65 RNA guide
auggauuggagagaacccau

SEQ ID NO: 37988 - RNA, 20 nt, Artificial Sequence
  RPE65 RNA guide
auggguucucuccaauccau

SEQ ID NO: 37989 - RNA, 20 nt, Artificial Sequence
  RPE65 RNA guide
auggucauucuguguguccu

SEQ ID NO: 37990 - RNA, 20 nt, Artificial Sequence
  RPE65 RNA guide
auggucccugccuuucauag

SEQ ID NO: 37991 - RNA, 20 nt, Artificial Sequence
  RPE65 RNA guide
auguaugauucuaacuugau

SEQ ID NO: 37992 - RNA, 20 nt, Artificial Sequence
  RPE65 RNA guide
augucaaauagcuagucauu

SEQ ID NO: 37993 - RNA, 20 nt, Artificial Sequence
  RPE65 RNA guide
auguggcucucauguucuuu

SEQ ID NO: 37994 - RNA, 20 nt, Artificial Sequence
  RPE65 RNA guide
auguuacccuacucauugau

SEQ ID NO: 37995 - RNA, 20 nt, Artificial Sequence
  RPE65 RNA guide
auguuaggcauuuuauaugg

SEQ ID NO: 37996 - RNA, 20 nt, Artificial Sequence
  RPE65 RNA guide
auguucuuuucaccaaauua

SEQ ID NO: 37997 - RNA, 20 nt, Artificial Sequence
  RPE65 RNA guide
auguuuguccuaugucaaau

SEQ ID NO: 37998 - RNA, 20 nt, Artificial Sequence
  RPE65 RNA guide
auuacaccaauugcaggaaa

SEQ ID NO: 37999 - RNA, 20 nt, Artificial Sequence
  RPE65 RNA guide
auuauucaugcugcgaaugu

SEQ ID NO: 38000 - RNA, 20 nt, Artificial Sequence
  RPE65 RNA guide
auucaugcugcgaauguaug

SEQ ID NO: 38001 - RNA, 20 nt, Artificial Sequence
  RPE65 RNA guide
auuccaagcuccaaauggac

SEQ ID NO: 38002 - RNA, 20 nt, Artificial Sequence
  RPE65 RNA guide
auuccugaacaucaccuagc

SEQ ID NO: 38003 - RNA, 20 nt, Artificial Sequence
  RPE65 RNA guide
auucuaaauuccugaacauc

SEQ ID NO: 38004 - RNA, 20 nt, Artificial Sequence
  RPE65 RNA guide
auucuaacuugaugaggaca

SEQ ID NO: 38005 - RNA, 20 nt, Artificial Sequence
  RPE65 RNA guide
auucugaauauggaaagcac

SEQ ID NO: 38006 - RNA, 20 nt, Artificial Sequence
  RPE65 RNA guide
auucuguguguccucaucaa

SEQ ID NO: 38007 - RNA, 20 nt, Artificial Sequence
  RPE65 RNA guide
auugaucuaucccuugcauc

SEQ ID NO: 38008 - RNA, 20 nt, Artificial Sequence
  RPE65 RNA guide
auugcaggaaagcaucauag

SEQ ID NO: 38009 - RNA, 20 nt, Artificial Sequence
  RPE65 RNA guide
auugccucugucuaugaugc

SEQ ID NO: 38010 - RNA, 20 nt, Artificial Sequence
  RPE65 RNA guide
auuggagagaacccauauaa

SEQ ID NO: 38011 - RNA, 20 nt, Artificial Sequence
  RPE65 RNA guide
auuguugacaaugcuaggau

SEQ ID NO: 38012 - RNA, 20 nt, Artificial Sequence
  RPE65 RNA guide
auuuaccagguucaugcuag

SEQ ID NO: 38013 - RNA, 20 nt, Artificial Sequence
  RPE65 RNA guide
auuuaugcuagaugcaaggg

SEQ ID NO: 38014 - RNA, 20 nt, Artificial Sequence
  RPE65 RNA guide
auuugaaacuuaauguggcu

SEQ ID NO: 38015 - RNA, 20 nt, Artificial Sequence
  RPE65 RNA guide
auuuggagcuuggaaugguc

SEQ ID NO: 38016 - RNA, 20 nt, Artificial Sequence
  RPE65 RNA guide
auuuggugaaaagaacauga

SEQ ID NO: 38017 - RNA, 20 nt, Artificial Sequence
  RPE65 RNA guide
auuuuauauggguucucucc

SEQ ID NO: 38018 - RNA, 20 nt, Artificial Sequence
  RPE65 RNA guide
caaauacuuaucaagugcuu

SEQ ID NO: 38019 - RNA, 20 nt, Artificial Sequence
  RPE65 RNA guide
caaauagcuagucauuguug

SEQ ID NO: 38020 - RNA, 20 nt, Artificial Sequence
  RPE65 RNA guide
caaauccuagcauugucaac

SEQ ID NO: 38021 - RNA, 20 nt, Artificial Sequence
  RPE65 RNA guide
caaauggacugcacugauug

SEQ ID NO: 38022 - RNA, 20 nt, Artificial Sequence
  RPE65 RNA guide
caaauuacaccaauugcagg

SEQ ID NO: 38023 - RNA, 20 nt, Artificial Sequence
  RPE65 RNA guide
caacaaugacuagcuauuug

SEQ ID NO: 38024 - RNA, 20 nt, Artificial Sequence
  RPE65 RNA guide
caacauaaauuauucaugcu

SEQ ID NO: 38025 - RNA, 20 nt, Artificial Sequence
  RPE65 RNA guide
caagcuccaaauggacugca

SEQ ID NO: 38026 - RNA, 20 nt, Artificial Sequence
  RPE65 RNA guide
caagggauagaucaaugagu

SEQ ID NO: 38027 - RNA, 20 nt, Artificial Sequence
  RPE65 RNA guide
caagugcuuuccauauucag

SEQ ID NO: 38028 - RNA, 20 nt, Artificial Sequence
  RPE65 RNA guide
caaguuagaaucauacauuc

SEQ ID NO: 38029 - RNA, 20 nt, Artificial Sequence
  RPE65 RNA guide
caaucagugcaguccauuug

SEQ ID NO: 38030 - RNA, 20 nt, Artificial Sequence
  RPE65 RNA guide
caaugacuagcuauuugaca

SEQ ID NO: 38031 - RNA, 20 nt, Artificial Sequence
  RPE65 RNA guide
caaugaguaggguaacaugg

SEQ ID NO: 38032 - RNA, 20 nt, Artificial Sequence
  RPE65 RNA guide
caauguuuguccuaugucaa

SEQ ID NO: 38033 - RNA, 20 nt, Artificial Sequence
  RPE65 RNA guide
caauugcaggaaagcaucau

SEQ ID NO: 38034 - RNA, 20 nt, Artificial Sequence
  RPE65 RNA guide
caauugguguaauuugguga

SEQ ID NO: 38035 - RNA, 20 nt, Artificial Sequence
  RPE65 RNA guide
cacaaauacuuaucaagugc

SEQ ID NO: 38036 - RNA, 20 nt, Artificial Sequence
  RPE65 RNA guide
cacacagaaugaccauucca

SEQ ID NO: 38037 - RNA, 20 nt, Artificial Sequence
  RPE65 RNA guide
cacagaaugaccauuccaag

SEQ ID NO: 38038 - RNA, 20 nt, Artificial Sequence
  RPE65 RNA guide
cacagugcuaggugauguuc

SEQ ID NO: 38039 - RNA, 20 nt, Artificial Sequence
  RPE65 RNA guide
cacauuaaguuucaaauccu

SEQ ID NO: 38040 - RNA, 20 nt, Artificial Sequence
  RPE65 RNA guide
caccaaauuacaccaauugc

SEQ ID NO: 38041 - RNA, 20 nt, Artificial Sequence
  RPE65 RNA guide
caccaauugcaggaaagcau

SEQ ID NO: 38042 - RNA, 20 nt, Artificial Sequence
  RPE65 RNA guide
cacccaguauuuaccagguu

SEQ ID NO: 38043 - RNA, 20 nt, Artificial Sequence
  RPE65 RNA guide
cacugauugccucugucuau

SEQ ID NO: 38044 - RNA, 20 nt, Artificial Sequence
  RPE65 RNA guide
cacuuacauggauuggagag

SEQ ID NO: 38045 - RNA, 20 nt, Artificial Sequence
  RPE65 RNA guide
cacuugauaaguauuugugu

SEQ ID NO: 38046 - RNA, 20 nt, Artificial Sequence
  RPE65 RNA guide
cagaaugaccauuccaagcu

SEQ ID NO: 38047 - RNA, 20 nt, Artificial Sequence
  RPE65 RNA guide
cagaauuuaugcuagaugca

SEQ ID NO: 38048 - RNA, 20 nt, Artificial Sequence
  RPE65 RNA guide
cagaggcaaucagugcaguc

SEQ ID NO: 38049 - RNA, 20 nt, Artificial Sequence
  RPE65 RNA guide
caggaaagcaucauagacag

SEQ ID NO: 38050 - RNA, 20 nt, Artificial Sequence
  RPE65 RNA guide
cagggaccauguuacccuac

SEQ ID NO: 38051 - RNA, 20 nt, Artificial Sequence
  RPE65 RNA guide
cagguucaugcuagcuuaua

SEQ ID NO: 38052 - RNA, 20 nt, Artificial Sequence
  RPE65 RNA guide
caguauuuaccagguucaug

SEQ ID NO: 38053 - RNA, 20 nt, Artificial Sequence
  RPE65 RNA guide
caguccauuuggagcuugga

SEQ ID NO: 38054 - RNA, 20 nt, Artificial Sequence
  RPE65 RNA guide
cagugcaguccauuuggagc

SEQ ID NO: 38055 - RNA, 20 nt, Artificial Sequence
  RPE65 RNA guide
cagugcuaggugauguucag

SEQ ID NO: 38056 - RNA, 20 nt, Artificial Sequence
  RPE65 RNA guide
cauaaauuauucaugcugcg

SEQ ID NO: 38057 - RNA, 20 nt, Artificial Sequence
  RPE65 RNA guide
cauacauucgcagcaugaau

SEQ ID NO: 38058 - RNA, 20 nt, Artificial Sequence
  RPE65 RNA guide
cauagacagaggcaaucagu

SEQ ID NO: 38059 - RNA, 20 nt, Artificial Sequence
  RPE65 RNA guide
cauagcuuuuauaagcuagc

SEQ ID NO: 38060 - RNA, 20 nt, Artificial Sequence
  RPE65 RNA guide
cauaggacaaacauuguuuc

SEQ ID NO: 38061 - RNA, 20 nt, Artificial Sequence
  RPE65 RNA guide
caucaaguuagaaucauaca

SEQ ID NO: 38062 - RNA, 20 nt, Artificial Sequence
  RPE65 RNA guide
caucauagacagaggcaauc

SEQ ID NO: 38063 - RNA, 20 nt, Artificial Sequence
  RPE65 RNA guide
caugaaccugguaaauacug

SEQ ID NO: 38064 - RNA, 20 nt, Artificial Sequence
  RPE65 RNA guide
caugacacaaauacuuauca

SEQ ID NO: 38065 - RNA, 20 nt, Artificial Sequence
  RPE65 RNA guide
caugagagccacauuaaguu

SEQ ID NO: 38066 - RNA, 20 nt, Artificial Sequence
  RPE65 RNA guide
caugcuagcuuauaaaagcu

SEQ ID NO: 38067 - RNA, 20 nt, Artificial Sequence
  RPE65 RNA guide
caugcugcgaauguaugauu

SEQ ID NO: 38068 - RNA, 20 nt, Artificial Sequence
  RPE65 RNA guide
cauggauuggagagaaccca

SEQ ID NO: 38069 - RNA, 20 nt, Artificial Sequence
  RPE65 RNA guide
cauggucccugccuuucaua

SEQ ID NO: 38070 - RNA, 20 nt, Artificial Sequence
  RPE65 RNA guide
cauguuacccuacucauuga

SEQ ID NO: 38071 - RNA, 20 nt, Artificial Sequence
  RPE65 RNA guide
cauguucuuuucaccaaauu

SEQ ID NO: 38072 - RNA, 20 nt, Artificial Sequence
  RPE65 RNA guide
cauuccaagcuccaaaugga

SEQ ID NO: 38073 - RNA, 20 nt, Artificial Sequence
  RPE65 RNA guide
cauucgcagcaugaauaauu

SEQ ID NO: 38074 - RNA, 20 nt, Artificial Sequence
  RPE65 RNA guide
cauucuguguguccucauca

SEQ ID NO: 38075 - RNA, 20 nt, Artificial Sequence
  RPE65 RNA guide
cauugaucuaucccuugcau

SEQ ID NO: 38076 - RNA, 20 nt, Artificial Sequence
  RPE65 RNA guide
cauugucaacaaugacuagc

SEQ ID NO: 38077 - RNA, 20 nt, Artificial Sequence
  RPE65 RNA guide
cauuguugacaaugcuagga

SEQ ID NO: 38078 - RNA, 20 nt, Artificial Sequence
  RPE65 RNA guide
cauuuggagcuuggaauggu

SEQ ID NO: 38079 - RNA, 20 nt, Artificial Sequence
  RPE65 RNA guide
cauuuuauauggguucucuc

SEQ ID NO: 38080 - RNA, 20 nt, Artificial Sequence
  RPE65 RNA guide
ccaaauggacugcacugauu

SEQ ID NO: 38081 - RNA, 20 nt, Artificial Sequence
  RPE65 RNA guide
ccaaauuacaccaauugcag

SEQ ID NO: 38082 - RNA, 20 nt, Artificial Sequence
  RPE65 RNA guide
ccaaauucuaaauuccugaa

SEQ ID NO: 38083 - RNA, 20 nt, Artificial Sequence
  RPE65 RNA guide
ccaagcuccaaauggacugc

SEQ ID NO: 38084 - RNA, 20 nt, Artificial Sequence
  RPE65 RNA guide
ccaauugcaggaaagcauca

SEQ ID NO: 38085 - RNA, 20 nt, Artificial Sequence
  RPE65 RNA guide
ccacauuaaguuucaaaucc

SEQ ID NO: 38086 - RNA, 20 nt, Artificial Sequence
  RPE65 RNA guide
ccagguucaugcuagcuuau

SEQ ID NO: 38087 - RNA, 20 nt, Artificial Sequence
  RPE65 RNA guide
ccaguauuuaccagguucau

SEQ ID NO: 38088 - RNA, 20 nt, Artificial Sequence
  RPE65 RNA guide
ccauguuacccuacucauug

SEQ ID NO: 38089 - RNA, 20 nt, Artificial Sequence
  RPE65 RNA guide
ccauuccaagcuccaaaugg

SEQ ID NO: 38090 - RNA, 20 nt, Artificial Sequence
  RPE65 RNA guide
ccauuuggagcuuggaaugg

SEQ ID NO: 38091 - RNA, 20 nt, Artificial Sequence
  RPE65 RNA guide
cccaguauuuaccagguuca

SEQ ID NO: 38092 - RNA, 20 nt, Artificial Sequence
  RPE65 RNA guide
cccuacucauugaucuaucc

SEQ ID NO: 38093 - RNA, 20 nt, Artificial Sequence
  RPE65 RNA guide
cccugccuuucauagcuuuu

SEQ ID NO: 38094 - RNA, 20 nt, Artificial Sequence
  RPE65 RNA guide
cccuugcaucuagcauaaau

SEQ ID NO: 38095 - RNA, 20 nt, Artificial Sequence
  RPE65 RNA guide
ccuacucauugaucuauccc

SEQ ID NO: 38096 - RNA, 20 nt, Artificial Sequence
  RPE65 RNA guide
ccuagcauugucaacaauga

SEQ ID NO: 38097 - RNA, 20 nt, Artificial Sequence
  RPE65 RNA guide
ccuaugucaaauagcuaguc

SEQ ID NO: 38098 - RNA, 20 nt, Artificial Sequence
  RPE65 RNA guide
ccucaucaaguuagaaucau

SEQ ID NO: 38099 - RNA, 20 nt, Artificial Sequence
  RPE65 RNA guide
ccucugucuaugaugcuuuc

SEQ ID NO: 38100 - RNA, 20 nt, Artificial Sequence
  RPE65 RNA guide
ccugaacaucaccuagcacu

SEQ ID NO: 38101 - RNA, 20 nt, Artificial Sequence
  RPE65 RNA guide
ccugcaauugguguaauuug

SEQ ID NO: 38102 - RNA, 20 nt, Artificial Sequence
  RPE65 RNA guide
ccugccuuucauagcuuuua

SEQ ID NO: 38103 - RNA, 20 nt, Artificial Sequence
  RPE65 RNA guide
ccuugcaucuagcauaaauu

SEQ ID NO: 38104 - RNA, 20 nt, Artificial Sequence
  RPE65 RNA guide
ccuuucauagcuuuuauaag

SEQ ID NO: 38105 - RNA, 20 nt, Artificial Sequence
  RPE65 RNA guide
cgaauguaugauucuaacuu

SEQ ID NO: 38106 - RNA, 20 nt, Artificial Sequence
  RPE65 RNA guide
cgcagcaugaauaauuuaug

SEQ ID NO: 38107 - RNA, 20 nt, Artificial Sequence
  RPE65 RNA guide
cuaaauuccugaacaucacc

SEQ ID NO: 38108 - RNA, 20 nt, Artificial Sequence
  RPE65 RNA guide
cuaacuugaugaggacacac

SEQ ID NO: 38109 - RNA, 20 nt, Artificial Sequence
  RPE65 RNA guide
cuacucauugaucuaucccu

SEQ ID NO: 38110 - RNA, 20 nt, Artificial Sequence
  RPE65 RNA guide
cuagaugcaagggauagauc

SEQ ID NO: 38111 - RNA, 20 nt, Artificial Sequence
  RPE65 RNA guide
cuagcaugaaccugguaaau

SEQ ID NO: 38112 - RNA, 20 nt, Artificial Sequence
  RPE65 RNA guide
cuagcauugucaacaaugac

SEQ ID NO: 38113 - RNA, 20 nt, Artificial Sequence
  RPE65 RNA guide
cuagcuauuugacauaggac

SEQ ID NO: 38114 - RNA, 20 nt, Artificial Sequence
  RPE65 RNA guide
cuagcuuauaaaagcuauga

SEQ ID NO: 38115 - RNA, 20 nt, Artificial Sequence
  RPE65 RNA guide
cuaggauuugaaacuuaaug

SEQ ID NO: 38116 - RNA, 20 nt, Artificial Sequence
  RPE65 RNA guide
cuaggugauguucaggaauu

SEQ ID NO: 38117 - RNA, 20 nt, Artificial Sequence
  RPE65 RNA guide
cuagucauuguugacaaugc

SEQ ID NO: 38118 - RNA, 20 nt, Artificial Sequence
  RPE65 RNA guide
cuaucccuugcaucuagcau

SEQ ID NO: 38119 - RNA, 20 nt, Artificial Sequence
  RPE65 RNA guide
cuaugaaaggcagggaccau

SEQ ID NO: 38120 - RNA, 20 nt, Artificial Sequence
  RPE65 RNA guide
cuaugaugcuuuccugcaau

SEQ ID NO: 38121 - RNA, 20 nt, Artificial Sequence
  RPE65 RNA guide
cuaugucaaauagcuaguca

SEQ ID NO: 38122 - RNA, 20 nt, Artificial Sequence
  RPE65 RNA guide
cuauuugacauaggacaaac

SEQ ID NO: 38123 - RNA, 20 nt, Artificial Sequence
  RPE65 RNA guide
cucauguucuuuucaccaaa

SEQ ID NO: 38124 - RNA, 20 nt, Artificial Sequence
  RPE65 RNA guide
cucauugaucuaucccuugc

SEQ ID NO: 38125 - RNA, 20 nt, Artificial Sequence
  RPE65 RNA guide
cuccaaauggacugcacuga

SEQ ID NO: 38126 - RNA, 20 nt, Artificial Sequence
  RPE65 RNA guide
cuccaauccauguaaguguu

SEQ ID NO: 38127 - RNA, 20 nt, Artificial Sequence
  RPE65 RNA guide
cucucauguucuuuucacca

SEQ ID NO: 38128 - RNA, 20 nt, Artificial Sequence
  RPE65 RNA guide
cucuccaauccauguaagug

SEQ ID NO: 38129 - RNA, 20 nt, Artificial Sequence
  RPE65 RNA guide
cucugucuaugaugcuuucc

SEQ ID NO: 38130 - RNA, 20 nt, Artificial Sequence
  RPE65 RNA guide
cugaacaucaccuagcacug

SEQ ID NO: 38131 - RNA, 20 nt, Artificial Sequence
  RPE65 RNA guide
cugaauauggaaagcacuug

SEQ ID NO: 38132 - RNA, 20 nt, Artificial Sequence
  RPE65 RNA guide
cugauugccucugucuauga

SEQ ID NO: 38133 - RNA, 20 nt, Artificial Sequence
  RPE65 RNA guide
cugcaauugguguaauuugg

SEQ ID NO: 38134 - RNA, 20 nt, Artificial Sequence
  RPE65 RNA guide
cugcacugauugccucuguc

SEQ ID NO: 38135 - RNA, 20 nt, Artificial Sequence
  RPE65 RNA guide
cugccuuucauagcuuuuau

SEQ ID NO: 38136 - RNA, 20 nt, Artificial Sequence
  RPE65 RNA guide
cugcgaauguaugauucuaa

SEQ ID NO: 38137 - RNA, 20 nt, Artificial Sequence
  RPE65 RNA guide
cugucuaugaugcuuuccug

SEQ ID NO: 38138 - RNA, 20 nt, Artificial Sequence
  RPE65 RNA guide
cuguguguccucaucaaguu

SEQ ID NO: 38139 - RNA, 20 nt, Artificial Sequence
  RPE65 RNA guide
cuuaauguggcucucauguu

SEQ ID NO: 38140 - RNA, 20 nt, Artificial Sequence
  RPE65 RNA guide
cuuacauggauuggagagaa

SEQ ID NO: 38141 - RNA, 20 nt, Artificial Sequence
  RPE65 RNA guide
cuuauaaaagcuaugaaagg

SEQ ID NO: 38142 - RNA, 20 nt, Artificial Sequence
  RPE65 RNA guide
cuuaucaagugcuuuccaua

SEQ ID NO: 38143 - RNA, 20 nt, Artificial Sequence
  RPE65 RNA guide
cuugaugaggacacacagaa

SEQ ID NO: 38144 - RNA, 20 nt, Artificial Sequence
  RPE65 RNA guide
cuugcaucuagcauaaauuc

SEQ ID NO: 38145 - RNA, 20 nt, Artificial Sequence
  RPE65 RNA guide
cuuggaauggucauucugug

SEQ ID NO: 38146 - RNA, 20 nt, Artificial Sequence
  RPE65 RNA guide
cuuucauagcuuuuauaagc

SEQ ID NO: 38147 - RNA, 20 nt, Artificial Sequence
  RPE65 RNA guide
cuuuccugcaauugguguaa

SEQ ID NO: 38148 - RNA, 20 nt, Artificial Sequence
  RPE65 RNA guide
cuuuuauaagcuagcaugaa

SEQ ID NO: 38149 - RNA, 20 nt, Artificial Sequence
  RPE65 RNA guide
cuuuucaccaaauuacacca

SEQ ID NO: 38150 - RNA, 20 nt, Artificial Sequence
  RPE65 RNA guide
gaaaagaacaugagagccac

SEQ ID NO: 38151 - RNA, 20 nt, Artificial Sequence
  RPE65 RNA guide
gaaacaauguuuguccuaug

SEQ ID NO: 38152 - RNA, 20 nt, Artificial Sequence
  RPE65 RNA guide
gaaacuuaauguggcucuca

SEQ ID NO: 38153 - RNA, 20 nt, Artificial Sequence
  RPE65 RNA guide
gaaagcacuugauaaguauu

SEQ ID NO: 38154 - RNA, 20 nt, Artificial Sequence
  RPE65 RNA guide
gaaagcaucauagacagagg

SEQ ID NO: 38155 - RNA, 20 nt, Artificial Sequence
  RPE65 RNA guide
gaaaggcagggaccauguua

SEQ ID NO: 38156 - RNA, 20 nt, Artificial Sequence
  RPE65 RNA guide
gaacaucaccuagcacugug

SEQ ID NO: 38157 - RNA, 20 nt, Artificial Sequence
  RPE65 RNA guide
gaacaugagagccacauuaa

SEQ ID NO: 38158 - RNA, 20 nt, Artificial Sequence
  RPE65 RNA guide
gaacccauauaaaaugccua

SEQ ID NO: 38159 - RNA, 20 nt, Artificial Sequence
  RPE65 RNA guide
gaaccugguaaauacugggu

SEQ ID NO: 38160 - RNA, 20 nt, Artificial Sequence
  RPE65 RNA guide
gaagaaacaauguuuguccu

SEQ ID NO: 38161 - RNA, 20 nt, Artificial Sequence
  RPE65 RNA guide
gaauauggaaagcacuugau

SEQ ID NO: 38162 - RNA, 20 nt, Artificial Sequence
  RPE65 RNA guide
gaaucauacauucgcagcau

SEQ ID NO: 38163 - RNA, 20 nt, Artificial Sequence
  RPE65 RNA guide
gaaugaccauuccaagcucc

SEQ ID NO: 38164 - RNA, 20 nt, Artificial Sequence
  RPE65 RNA guide
gaauggucauucuguguguc

SEQ ID NO: 38165 - RNA, 20 nt, Artificial Sequence
  RPE65 RNA guide
gaauuuaugcuagaugcaag

SEQ ID NO: 38166 - RNA, 20 nt, Artificial Sequence
  RPE65 RNA guide
gacaaacauuguuucuucau

SEQ ID NO: 38167 - RNA, 20 nt, Artificial Sequence
  RPE65 RNA guide
gacaaugcuaggauuugaaa

SEQ ID NO: 38168 - RNA, 20 nt, Artificial Sequence
  RPE65 RNA guide
gacacaaauacuuaucaagu

SEQ ID NO: 38169 - RNA, 20 nt, Artificial Sequence
  RPE65 RNA guide
gacacacagaaugaccauuc

SEQ ID NO: 38170 - RNA, 20 nt, Artificial Sequence
  RPE65 RNA guide
gacacagugcuaggugaugu

SEQ ID NO: 38171 - RNA, 20 nt, Artificial Sequence
  RPE65 RNA guide
gacagaggcaaucagugcag

SEQ ID NO: 38172 - RNA, 20 nt, Artificial Sequence
  RPE65 RNA guide
gacauaggacaaacauuguu

SEQ ID NO: 38173 - RNA, 20 nt, Artificial Sequence
  RPE65 RNA guide
gaccauguuacccuacucau

SEQ ID NO: 38174 - RNA, 20 nt, Artificial Sequence
  RPE65 RNA guide
gaccauuccaagcuccaaau

SEQ ID NO: 38175 - RNA, 20 nt, Artificial Sequence
  RPE65 RNA guide
gacuagcuauuugacauagg

SEQ ID NO: 38176 - RNA, 20 nt, Artificial Sequence
  RPE65 RNA guide
gacugcacugauugccucug

SEQ ID NO: 38177 - RNA, 20 nt, Artificial Sequence
  RPE65 RNA guide
gagaacccauauaaaaugcc

SEQ ID NO: 38178 - RNA, 20 nt, Artificial Sequence
  RPE65 RNA guide
gagagaacccauauaaaaug

SEQ ID NO: 38179 - RNA, 20 nt, Artificial Sequence
  RPE65 RNA guide
gagagccacauuaaguuuca

SEQ ID NO: 38180 - RNA, 20 nt, Artificial Sequence
  RPE65 RNA guide
gagaugaagaaacaauguuu

SEQ ID NO: 38181 - RNA, 20 nt, Artificial Sequence
  RPE65 RNA guide
gagcacccaguauuuaccag

SEQ ID NO: 38182 - RNA, 20 nt, Artificial Sequence
  RPE65 RNA guide
gagccacauuaaguuucaaa

SEQ ID NO: 38183 - RNA, 20 nt, Artificial Sequence
  RPE65 RNA guide
gagcuuggaauggucauucu

SEQ ID NO: 38184 - RNA, 20 nt, Artificial Sequence
  RPE65 RNA guide
gaggacacacagaaugacca

SEQ ID NO: 38185 - RNA, 20 nt, Artificial Sequence
  RPE65 RNA guide
gaggcaaucagugcagucca

SEQ ID NO: 38186 - RNA, 20 nt, Artificial Sequence
  RPE65 RNA guide
gaguaggguaacaugguccc

SEQ ID NO: 38187 - RNA, 20 nt, Artificial Sequence
  RPE65 RNA guide
gauagaucaaugaguagggu

SEQ ID NO: 38188 - RNA, 20 nt, Artificial Sequence
  RPE65 RNA guide
gaucaaugaguaggguaaca

SEQ ID NO: 38189 - RNA, 20 nt, Artificial Sequence
  RPE65 RNA guide
gaucuaucccuugcaucuag

SEQ ID NO: 38190 - RNA, 20 nt, Artificial Sequence
  RPE65 RNA guide
gaugaagaaacaauguuugu

SEQ ID NO: 38191 - RNA, 20 nt, Artificial Sequence
  RPE65 RNA guide
gaugaggacacacagaauga

SEQ ID NO: 38192 - RNA, 20 nt, Artificial Sequence
  RPE65 RNA guide
gaugcaagggauagaucaau

SEQ ID NO: 38193 - RNA, 20 nt, Artificial Sequence
  RPE65 RNA guide
gaugcuuuccugcaauuggu

SEQ ID NO: 38194 - RNA, 20 nt, Artificial Sequence
  RPE65 RNA guide
gauguucaggaauuuagaau

SEQ ID NO: 38195 - RNA, 20 nt, Artificial Sequence
  RPE65 RNA guide
gauucuaacuugaugaggac

SEQ ID NO: 38196 - RNA, 20 nt, Artificial Sequence
  RPE65 RNA guide
gauugccucugucuaugaug

SEQ ID NO: 38197 - RNA, 20 nt, Artificial Sequence
  RPE65 RNA guide
gauuggagagaacccauaua

SEQ ID NO: 38198 - RNA, 20 nt, Artificial Sequence
  RPE65 RNA guide
gauuugaaacuuaauguggc

SEQ ID NO: 38199 - RNA, 20 nt, Artificial Sequence
  RPE65 RNA guide
gcaagggauagaucaaugag

SEQ ID NO: 38200 - RNA, 20 nt, Artificial Sequence
  RPE65 RNA guide
gcaaucagugcaguccauuu

SEQ ID NO: 38201 - RNA, 20 nt, Artificial Sequence
  RPE65 RNA guide
gcaauugguguaauuuggug

SEQ ID NO: 38202 - RNA, 20 nt, Artificial Sequence
  RPE65 RNA guide
gcacccaguauuuaccaggu

SEQ ID NO: 38203 - RNA, 20 nt, Artificial Sequence
  RPE65 RNA guide
gcacugauugccucugucua

SEQ ID NO: 38204 - RNA, 20 nt, Artificial Sequence
  RPE65 RNA guide
gcacuugauaaguauuugug

SEQ ID NO: 38205 - RNA, 20 nt, Artificial Sequence
  RPE65 RNA guide
gcaggaaagcaucauagaca

SEQ ID NO: 38206 - RNA, 20 nt, Artificial Sequence
  RPE65 RNA guide
gcagggaccauguuacccua

SEQ ID NO: 38207 - RNA, 20 nt, Artificial Sequence
  RPE65 RNA guide
gcaguccauuuggagcuugg

SEQ ID NO: 38208 - RNA, 20 nt, Artificial Sequence
  RPE65 RNA guide
gcauaaauucugaauaugga

SEQ ID NO: 38209 - RNA, 20 nt, Artificial Sequence
  RPE65 RNA guide
gcaucauagacagaggcaau

SEQ ID NO: 38210 - RNA, 20 nt, Artificial Sequence
  RPE65 RNA guide
gcaugaaccugguaaauacu

SEQ ID NO: 38211 - RNA, 20 nt, Artificial Sequence
  RPE65 RNA guide
gcauugucaacaaugacuag

SEQ ID NO: 38212 - RNA, 20 nt, Artificial Sequence
  RPE65 RNA guide
gcauuuuauauggguucucu

SEQ ID NO: 38213 - RNA, 20 nt, Artificial Sequence
  RPE65 RNA guide
gccacauuaaguuucaaauc

SEQ ID NO: 38214 - RNA, 20 nt, Artificial Sequence
  RPE65 RNA guide
gccucugucuaugaugcuuu

SEQ ID NO: 38215 - RNA, 20 nt, Artificial Sequence
  RPE65 RNA guide
gccuuucauagcuuuuauaa

SEQ ID NO: 38216 - RNA, 20 nt, Artificial Sequence
  RPE65 RNA guide
gcgaauguaugauucuaacu

SEQ ID NO: 38217 - RNA, 20 nt, Artificial Sequence
  RPE65 RNA guide
gcuagaugcaagggauagau

SEQ ID NO: 38218 - RNA, 20 nt, Artificial Sequence
  RPE65 RNA guide
gcuagcaugaaccugguaaa

SEQ ID NO: 38219 - RNA, 20 nt, Artificial Sequence
  RPE65 RNA guide
gcuagcuuauaaaagcuaug

SEQ ID NO: 38220 - RNA, 20 nt, Artificial Sequence
  RPE65 RNA guide
gcuaggauuugaaacuuaau

SEQ ID NO: 38221 - RNA, 20 nt, Artificial Sequence
  RPE65 RNA guide
gcuaggugauguucaggaau

SEQ ID NO: 38222 - RNA, 20 nt, Artificial Sequence
  RPE65 RNA guide
gcuagucauuguugacaaug

SEQ ID NO: 38223 - RNA, 20 nt, Artificial Sequence
  RPE65 RNA guide
gcuaugaaaggcagggacca

SEQ ID NO: 38224 - RNA, 20 nt, Artificial Sequence
  RPE65 RNA guide
gcuauuugacauaggacaaa

SEQ ID NO: 38225 - RNA, 20 nt, Artificial Sequence
  RPE65 RNA guide
gcuccaaauggacugcacug

SEQ ID NO: 38226 - RNA, 20 nt, Artificial Sequence
  RPE65 RNA guide
gcucucauguucuuuucacc

SEQ ID NO: 38227 - RNA, 20 nt, Artificial Sequence
  RPE65 RNA guide
gcugcgaauguaugauucua

SEQ ID NO: 38228 - RNA, 20 nt, Artificial Sequence
  RPE65 RNA guide
gcuuauaaaagcuaugaaag

SEQ ID NO: 38229 - RNA, 20 nt, Artificial Sequence
  RPE65 RNA guide
gcuuggaauggucauucugu

SEQ ID NO: 38230 - RNA, 20 nt, Artificial Sequence
  RPE65 RNA guide
gcuuuccauauucagaauuu

SEQ ID NO: 38231 - RNA, 20 nt, Artificial Sequence
  RPE65 RNA guide
gcuuuccugcaauuggugua

SEQ ID NO: 38232 - RNA, 20 nt, Artificial Sequence
  RPE65 RNA guide
gcuuuuauaagcuagcauga

SEQ ID NO: 38233 - RNA, 20 nt, Artificial Sequence
  RPE65 RNA guide
ggaaagcacuugauaaguau

SEQ ID NO: 38234 - RNA, 20 nt, Artificial Sequence
  RPE65 RNA guide
ggaaagcaucauagacagag

SEQ ID NO: 38235 - RNA, 20 nt, Artificial Sequence
  RPE65 RNA guide
ggaauggucauucugugugu

SEQ ID NO: 38236 - RNA, 20 nt, Artificial Sequence
  RPE65 RNA guide
ggacaaacauuguuucuuca

SEQ ID NO: 38237 - RNA, 20 nt, Artificial Sequence
  RPE65 RNA guide
ggacacacagaaugaccauu

SEQ ID NO: 38238 - RNA, 20 nt, Artificial Sequence
  RPE65 RNA guide
ggacacagugcuaggugaug

SEQ ID NO: 38239 - RNA, 20 nt, Artificial Sequence
  RPE65 RNA guide
ggaccauguuacccuacuca

SEQ ID NO: 38240 - RNA, 20 nt, Artificial Sequence
  RPE65 RNA guide
ggacugcacugauugccucu

SEQ ID NO: 38241 - RNA, 20 nt, Artificial Sequence
  RPE65 RNA guide
ggagagaacccauauaaaau

SEQ ID NO: 38242 - RNA, 20 nt, Artificial Sequence
  RPE65 RNA guide
ggagcuuggaauggucauuc

SEQ ID NO: 38243 - RNA, 20 nt, Artificial Sequence
  RPE65 RNA guide
ggauagaucaaugaguaggg

SEQ ID NO: 38244 - RNA, 20 nt, Artificial Sequence
  RPE65 RNA guide
ggauuggagagaacccauau

SEQ ID NO: 38245 - RNA, 20 nt, Artificial Sequence
  RPE65 RNA guide
ggauuugaaacuuaaugugg

SEQ ID NO: 38246 - RNA, 20 nt, Artificial Sequence
  RPE65 RNA guide
ggcaaucagugcaguccauu

SEQ ID NO: 38247 - RNA, 20 nt, Artificial Sequence
  RPE65 RNA guide
ggcagggaccauguuacccu

SEQ ID NO: 38248 - RNA, 20 nt, Artificial Sequence
  RPE65 RNA guide
ggcauuuuauauggguucuc

SEQ ID NO: 38249 - RNA, 20 nt, Artificial Sequence
  RPE65 RNA guide
ggcucucauguucuuuucac

SEQ ID NO: 38250 - RNA, 20 nt, Artificial Sequence
  RPE65 RNA guide
gggacacagugcuaggugau

SEQ ID NO: 38251 - RNA, 20 nt, Artificial Sequence
  RPE65 RNA guide
gggaccauguuacccuacuc

SEQ ID NO: 38252 - RNA, 20 nt, Artificial Sequence
  RPE65 RNA guide
gggauagaucaaugaguagg

SEQ ID NO: 38253 - RNA, 20 nt, Artificial Sequence
  RPE65 RNA guide
ggguaacauggucccugccu

SEQ ID NO: 38254 - RNA, 20 nt, Artificial Sequence
  RPE65 RNA guide
ggguucucuccaauccaugu

SEQ ID NO: 38255 - RNA, 20 nt, Artificial Sequence
  RPE65 RNA guide
gguaacauggucccugccuu

SEQ ID NO: 38256 - RNA, 20 nt, Artificial Sequence
  RPE65 RNA guide
ggucauucuguguguccuca

SEQ ID NO: 38257 - RNA, 20 nt, Artificial Sequence
  RPE65 RNA guide
ggucccugccuuucauagcu

SEQ ID NO: 38258 - RNA, 20 nt, Artificial Sequence
  RPE65 RNA guide
ggugaaaagaacaugagagc

SEQ ID NO: 38259 - RNA, 20 nt, Artificial Sequence
  RPE65 RNA guide
ggugauguucaggaauuuag

SEQ ID NO: 38260 - RNA, 20 nt, Artificial Sequence
  RPE65 RNA guide
gguguaauuuggugaaaaga

SEQ ID NO: 38261 - RNA, 20 nt, Artificial Sequence
  RPE65 RNA guide
gguucaugcuagcuuauaaa

SEQ ID NO: 38262 - RNA, 20 nt, Artificial Sequence
  RPE65 RNA guide
gguucucuccaauccaugua

SEQ ID NO: 38263 - RNA, 20 nt, Artificial Sequence
  RPE65 RNA guide
guaacauggucccugccuuu

SEQ ID NO: 38264 - RNA, 20 nt, Artificial Sequence
  RPE65 RNA guide
guaauuuggugaaaagaaca

SEQ ID NO: 38265 - RNA, 20 nt, Artificial Sequence
  RPE65 RNA guide
guaggguaacauggucccug

SEQ ID NO: 38266 - RNA, 20 nt, Artificial Sequence
  RPE65 RNA guide
guaugauucuaacuugauga

SEQ ID NO: 38267 - RNA, 20 nt, Artificial Sequence
  RPE65 RNA guide
guauuuaccagguucaugcu

SEQ ID NO: 38268 - RNA, 20 nt, Artificial Sequence
  RPE65 RNA guide
gucaaauagcuagucauugu

SEQ ID NO: 38269 - RNA, 20 nt, Artificial Sequence
  RPE65 RNA guide
gucaacaaugacuagcuauu

SEQ ID NO: 38270 - RNA, 20 nt, Artificial Sequence
  RPE65 RNA guide
gucauucuguguguccucau

SEQ ID NO: 38271 - RNA, 20 nt, Artificial Sequence
  RPE65 RNA guide
gucauuguugacaaugcuag

SEQ ID NO: 38272 - RNA, 20 nt, Artificial Sequence
  RPE65 RNA guide
guccauuuggagcuuggaau

SEQ ID NO: 38273 - RNA, 20 nt, Artificial Sequence
  RPE65 RNA guide
gucccugccuuucauagcuu

SEQ ID NO: 38274 - RNA, 20 nt, Artificial Sequence
  RPE65 RNA guide
guccuaugucaaauagcuag

SEQ ID NO: 38275 - RNA, 20 nt, Artificial Sequence
  RPE65 RNA guide
guccucaucaaguuagaauc

SEQ ID NO: 38276 - RNA, 20 nt, Artificial Sequence
  RPE65 RNA guide
gucuaugaugcuuuccugca

SEQ ID NO: 38277 - RNA, 20 nt, Artificial Sequence
  RPE65 RNA guide
gugaaaagaacaugagagcc

SEQ ID NO: 38278 - RNA, 20 nt, Artificial Sequence
  RPE65 RNA guide
gugcaguccauuuggagcuu

SEQ ID NO: 38279 - RNA, 20 nt, Artificial Sequence
  RPE65 RNA guide
gugcuaggugauguucagga

SEQ ID NO: 38280 - RNA, 20 nt, Artificial Sequence
  RPE65 RNA guide
guggcucucauguucuuuuc

SEQ ID NO: 38281 - RNA, 20 nt, Artificial Sequence
  RPE65 RNA guide
gugggacacagugcuaggug

SEQ ID NO: 38282 - RNA, 20 nt, Artificial Sequence
  RPE65 RNA guide
guguaauuuggugaaaagaa

SEQ ID NO: 38283 - RNA, 20 nt, Artificial Sequence
  RPE65 RNA guide
guguccucaucaaguuagaa

SEQ ID NO: 38284 - RNA, 20 nt, Artificial Sequence
  RPE65 RNA guide
guguguccucaucaaguuag

SEQ ID NO: 38285 - RNA, 20 nt, Artificial Sequence
  RPE65 RNA guide
guuacccuacucauugaucu

SEQ ID NO: 38286 - RNA, 20 nt, Artificial Sequence
  RPE65 RNA guide
guuagaaucauacauucgca

SEQ ID NO: 38287 - RNA, 20 nt, Artificial Sequence
  RPE65 RNA guide
guuaggcauuuuauaugggu

SEQ ID NO: 38288 - RNA, 20 nt, Artificial Sequence
  RPE65 RNA guide
guucaggaauuuagaauuug

SEQ ID NO: 38289 - RNA, 20 nt, Artificial Sequence
  RPE65 RNA guide
guucaugcuagcuuauaaaa

SEQ ID NO: 38290 - RNA, 20 nt, Artificial Sequence
  RPE65 RNA guide
guuccaaauucuaaauuccu

SEQ ID NO: 38291 - RNA, 20 nt, Artificial Sequence
  RPE65 RNA guide
guucucuccaauccauguaa

SEQ ID NO: 38292 - RNA, 20 nt, Artificial Sequence
  RPE65 RNA guide
guucuuuucaccaaauuaca

SEQ ID NO: 38293 - RNA, 20 nt, Artificial Sequence
  RPE65 RNA guide
guugacaaugcuaggauuug

SEQ ID NO: 38294 - RNA, 20 nt, Artificial Sequence
  RPE65 RNA guide
guuucaaauccuagcauugu

SEQ ID NO: 38295 - RNA, 20 nt, Artificial Sequence
  RPE65 RNA guide
guuuguccuaugucaaauag

SEQ ID NO: 38296 - RNA, 20 nt, Artificial Sequence
  RPE65 RNA guide
uaaaagcuaugaaaggcagg

SEQ ID NO: 38297 - RNA, 20 nt, Artificial Sequence
  RPE65 RNA guide
uaaacacuuacauggauugg

SEQ ID NO: 38298 - RNA, 20 nt, Artificial Sequence
  RPE65 RNA guide
uaaauuccugaacaucaccu

SEQ ID NO: 38299 - RNA, 20 nt, Artificial Sequence
  RPE65 RNA guide
uaacauggucccugccuuuc

SEQ ID NO: 38300 - RNA, 20 nt, Artificial Sequence
  RPE65 RNA guide
uaacuugaugaggacacaca

SEQ ID NO: 38301 - RNA, 20 nt, Artificial Sequence
  RPE65 RNA guide
uaagcuagcaugaaccuggu

SEQ ID NO: 38302 - RNA, 20 nt, Artificial Sequence
  RPE65 RNA guide
uaaguuucaaauccuagcau

SEQ ID NO: 38303 - RNA, 20 nt, Artificial Sequence
  RPE65 RNA guide
uaauguggcucucauguucu

SEQ ID NO: 38304 - RNA, 20 nt, Artificial Sequence
  RPE65 RNA guide
uacaccaauugcaggaaagc

SEQ ID NO: 38305 - RNA, 20 nt, Artificial Sequence
  RPE65 RNA guide
uacauggauuggagagaacc

SEQ ID NO: 38306 - RNA, 20 nt, Artificial Sequence
  RPE65 RNA guide
uaccagguucaugcuagcuu

SEQ ID NO: 38307 - RNA, 20 nt, Artificial Sequence
  RPE65 RNA guide
uacccuacucauugaucuau

SEQ ID NO: 38308 - RNA, 20 nt, Artificial Sequence
  RPE65 RNA guide
uacucauugaucuaucccuu

SEQ ID NO: 38309 - RNA, 20 nt, Artificial Sequence
  RPE65 RNA guide
uagaaucauacauucgcagc

SEQ ID NO: 38310 - RNA, 20 nt, Artificial Sequence
  RPE65 RNA guide
uagacagaggcaaucagugc

SEQ ID NO: 38311 - RNA, 20 nt, Artificial Sequence
  RPE65 RNA guide
uagaucaaugaguaggguaa

SEQ ID NO: 38312 - RNA, 20 nt, Artificial Sequence
  RPE65 RNA guide
uagaugcaagggauagauca

SEQ ID NO: 38313 - RNA, 20 nt, Artificial Sequence
  RPE65 RNA guide
uagcaugaaccugguaaaua

SEQ ID NO: 38314 - RNA, 20 nt, Artificial Sequence
  RPE65 RNA guide
uagcauugucaacaaugacu

SEQ ID NO: 38315 - RNA, 20 nt, Artificial Sequence
  RPE65 RNA guide
uagcuagucauuguugacaa

SEQ ID NO: 38316 - RNA, 20 nt, Artificial Sequence
  RPE65 RNA guide
uagcuauuugacauaggaca

SEQ ID NO: 38317 - RNA, 20 nt, Artificial Sequence
  RPE65 RNA guide
uagcuuauaaaagcuaugaa

SEQ ID NO: 38318 - RNA, 20 nt, Artificial Sequence
  RPE65 RNA guide
uagcuuuuauaagcuagcau

SEQ ID NO: 38319 - RNA, 20 nt, Artificial Sequence
  RPE65 RNA guide
uaggacaaacauuguuucuu

SEQ ID NO: 38320 - RNA, 20 nt, Artificial Sequence
  RPE65 RNA guide
uaggauuugaaacuuaaugu

SEQ ID NO: 38321 - RNA, 20 nt, Artificial Sequence
  RPE65 RNA guide
uaggcauuuuauauggguuc

SEQ ID NO: 38322 - RNA, 20 nt, Artificial Sequence
  RPE65 RNA guide
uaggguaacauggucccugc

SEQ ID NO: 38323 - RNA, 20 nt, Artificial Sequence
  RPE65 RNA guide
uaggugauguucaggaauuu

SEQ ID NO: 38324 - RNA, 20 nt, Artificial Sequence
  RPE65 RNA guide
uagucauuguugacaaugcu

SEQ ID NO: 38325 - RNA, 20 nt, Artificial Sequence
  RPE65 RNA guide
uauaaaagcuaugaaaggca

SEQ ID NO: 38326 - RNA, 20 nt, Artificial Sequence
  RPE65 RNA guide
uauaagcuagcaugaaccug

SEQ ID NO: 38327 - RNA, 20 nt, Artificial Sequence
  RPE65 RNA guide
uauauggguucucuccaauc

SEQ ID NO: 38328 - RNA, 20 nt, Artificial Sequence
  RPE65 RNA guide
uaucaagugcuuuccauauu

SEQ ID NO: 38329 - RNA, 20 nt, Artificial Sequence
  RPE65 RNA guide
uaucccuugcaucuagcaua

SEQ ID NO: 38330 - RNA, 20 nt, Artificial Sequence
  RPE65 RNA guide
uaugaaaggcagggaccaug

SEQ ID NO: 38331 - RNA, 20 nt, Artificial Sequence
  RPE65 RNA guide
uaugaugcuuuccugcaauu

SEQ ID NO: 38332 - RNA, 20 nt, Artificial Sequence
  RPE65 RNA guide
uaugauucuaacuugaugag

SEQ ID NO: 38333 - RNA, 20 nt, Artificial Sequence
  RPE65 RNA guide
uaugcuagaugcaagggaua

SEQ ID NO: 38334 - RNA, 20 nt, Artificial Sequence
  RPE65 RNA guide
uauggguucucuccaaucca

SEQ ID NO: 38335 - RNA, 20 nt, Artificial Sequence
  RPE65 RNA guide
uauucaugcugcgaauguau

SEQ ID NO: 38336 - RNA, 20 nt, Artificial Sequence
  RPE65 RNA guide
uauuuaccagguucaugcua

SEQ ID NO: 38337 - RNA, 20 nt, Artificial Sequence
  RPE65 RNA guide
ucaaauagcuagucauuguu

SEQ ID NO: 38338 - RNA, 20 nt, Artificial Sequence
  RPE65 RNA guide
ucaaauccuagcauugucaa

SEQ ID NO: 38339 - RNA, 20 nt, Artificial Sequence
  RPE65 RNA guide
ucaacaaugacuagcuauuu

SEQ ID NO: 38340 - RNA, 20 nt, Artificial Sequence
  RPE65 RNA guide
ucaacauaaauuauucaugc

SEQ ID NO: 38341 - RNA, 20 nt, Artificial Sequence
  RPE65 RNA guide
ucaagugcuuuccauauuca

SEQ ID NO: 38342 - RNA, 20 nt, Artificial Sequence
  RPE65 RNA guide
ucaaguuagaaucauacauu

SEQ ID NO: 38343 - RNA, 20 nt, Artificial Sequence
  RPE65 RNA guide
ucaaugaguaggguaacaug

SEQ ID NO: 38344 - RNA, 20 nt, Artificial Sequence
  RPE65 RNA guide
ucaccaaauuacaccaauug

SEQ ID NO: 38345 - RNA, 20 nt, Artificial Sequence
  RPE65 RNA guide
ucagaauuuaugcuagaugc

SEQ ID NO: 38346 - RNA, 20 nt, Artificial Sequence
  RPE65 RNA guide
ucagugcaguccauuuggag

SEQ ID NO: 38347 - RNA, 20 nt, Artificial Sequence
  RPE65 RNA guide
ucauacauucgcagcaugaa

SEQ ID NO: 38348 - RNA, 20 nt, Artificial Sequence
  RPE65 RNA guide
ucauagacagaggcaaucag

SEQ ID NO: 38349 - RNA, 20 nt, Artificial Sequence
  RPE65 RNA guide
ucauagcuuuuauaagcuag

SEQ ID NO: 38350 - RNA, 20 nt, Artificial Sequence
  RPE65 RNA guide
ucaugcuagcuuauaaaagc

SEQ ID NO: 38351 - RNA, 20 nt, Artificial Sequence
  RPE65 RNA guide
ucaugcugcgaauguaugau

SEQ ID NO: 38352 - RNA, 20 nt, Artificial Sequence
  RPE65 RNA guide
ucauucuguguguccucauc

SEQ ID NO: 38353 - RNA, 20 nt, Artificial Sequence
  RPE65 RNA guide
ucauugaucuaucccuugca

SEQ ID NO: 38354 - RNA, 20 nt, Artificial Sequence
  RPE65 RNA guide
ucauuguugacaaugcuagg

SEQ ID NO: 38355 - RNA, 20 nt, Artificial Sequence
  RPE65 RNA guide
uccaaauggacugcacugau

SEQ ID NO: 38356 - RNA, 20 nt, Artificial Sequence
  RPE65 RNA guide
uccaagcuccaaauggacug

SEQ ID NO: 38357 - RNA, 20 nt, Artificial Sequence
  RPE65 RNA guide
uccauuuggagcuuggaaug

SEQ ID NO: 38358 - RNA, 20 nt, Artificial Sequence
  RPE65 RNA guide
ucccugccuuucauagcuuu

SEQ ID NO: 38359 - RNA, 20 nt, Artificial Sequence
  RPE65 RNA guide
ucccuugcaucuagcauaaa

SEQ ID NO: 38360 - RNA, 20 nt, Artificial Sequence
  RPE65 RNA guide
uccuagcauugucaacaaug

SEQ ID NO: 38361 - RNA, 20 nt, Artificial Sequence
  RPE65 RNA guide
uccuaugucaaauagcuagu

SEQ ID NO: 38362 - RNA, 20 nt, Artificial Sequence
  RPE65 RNA guide
uccucaucaaguuagaauca

SEQ ID NO: 38363 - RNA, 20 nt, Artificial Sequence
  RPE65 RNA guide
uccugaacaucaccuagcac

SEQ ID NO: 38364 - RNA, 20 nt, Artificial Sequence
  RPE65 RNA guide
uccugcaauugguguaauuu

SEQ ID NO: 38365 - RNA, 20 nt, Artificial Sequence
  RPE65 RNA guide
ucgcagcaugaauaauuuau

SEQ ID NO: 38366 - RNA, 20 nt, Artificial Sequence
  RPE65 RNA guide
ucuaaauuccugaacaucac

SEQ ID NO: 38367 - RNA, 20 nt, Artificial Sequence
  RPE65 RNA guide
ucuaacuugaugaggacaca

SEQ ID NO: 38368 - RNA, 20 nt, Artificial Sequence
  RPE65 RNA guide
ucuaucccuugcaucuagca

SEQ ID NO: 38369 - RNA, 20 nt, Artificial Sequence
  RPE65 RNA guide
ucuaugaugcuuuccugcaa

SEQ ID NO: 38370 - RNA, 20 nt, Artificial Sequence
  RPE65 RNA guide
ucuccaauccauguaagugu

SEQ ID NO: 38371 - RNA, 20 nt, Artificial Sequence
  RPE65 RNA guide
ucucuccaauccauguaagu

SEQ ID NO: 38372 - RNA, 20 nt, Artificial Sequence
  RPE65 RNA guide
ucugaauauggaaagcacuu

SEQ ID NO: 38373 - RNA, 20 nt, Artificial Sequence
  RPE65 RNA guide
ucugucuaugaugcuuuccu

SEQ ID NO: 38374 - RNA, 20 nt, Artificial Sequence
  RPE65 RNA guide
ucuguguguccucaucaagu

SEQ ID NO: 38375 - RNA, 20 nt, Artificial Sequence
  RPE65 RNA guide
ugaaaagaacaugagagcca

SEQ ID NO: 38376 - RNA, 20 nt, Artificial Sequence
  RPE65 RNA guide
ugaaacuuaauguggcucuc

SEQ ID NO: 38377 - RNA, 20 nt, Artificial Sequence
  RPE65 RNA guide
ugaaaggcagggaccauguu

SEQ ID NO: 38378 - RNA, 20 nt, Artificial Sequence
  RPE65 RNA guide
ugaacaucaccuagcacugu

SEQ ID NO: 38379 - RNA, 20 nt, Artificial Sequence
  RPE65 RNA guide
ugaaccugguaaauacuggg

SEQ ID NO: 38380 - RNA, 20 nt, Artificial Sequence
  RPE65 RNA guide
ugaagaaacaauguuugucc

SEQ ID NO: 38381 - RNA, 20 nt, Artificial Sequence
  RPE65 RNA guide
ugaauauggaaagcacuuga

SEQ ID NO: 38382 - RNA, 20 nt, Artificial Sequence
  RPE65 RNA guide
ugacaaugcuaggauuugaa

SEQ ID NO: 38383 - RNA, 20 nt, Artificial Sequence
  RPE65 RNA guide
ugacacaaauacuuaucaag

SEQ ID NO: 38384 - RNA, 20 nt, Artificial Sequence
  RPE65 RNA guide
ugacauaggacaaacauugu

SEQ ID NO: 38385 - RNA, 20 nt, Artificial Sequence
  RPE65 RNA guide
ugaccauuccaagcuccaaa

SEQ ID NO: 38386 - RNA, 20 nt, Artificial Sequence
  RPE65 RNA guide
ugacuagcuauuugacauag

SEQ ID NO: 38387 - RNA, 20 nt, Artificial Sequence
  RPE65 RNA guide
ugagagccacauuaaguuuc

SEQ ID NO: 38388 - RNA, 20 nt, Artificial Sequence
  RPE65 RNA guide
ugagcacccaguauuuacca

SEQ ID NO: 38389 - RNA, 20 nt, Artificial Sequence
  RPE65 RNA guide
ugaggacacacagaaugacc

SEQ ID NO: 38390 - RNA, 20 nt, Artificial Sequence
  RPE65 RNA guide
ugaguaggguaacauggucc

SEQ ID NO: 38391 - RNA, 20 nt, Artificial Sequence
  RPE65 RNA guide
ugaucuaucccuugcaucua

SEQ ID NO: 38392 - RNA, 20 nt, Artificial Sequence
  RPE65 RNA guide
ugaugaggacacacagaaug

SEQ ID NO: 38393 - RNA, 20 nt, Artificial Sequence
  RPE65 RNA guide
ugaugcuuuccugcaauugg

SEQ ID NO: 38394 - RNA, 20 nt, Artificial Sequence
  RPE65 RNA guide
ugauucuaacuugaugagga

SEQ ID NO: 38395 - RNA, 20 nt, Artificial Sequence
  RPE65 RNA guide
ugauugccucugucuaugau

SEQ ID NO: 38396 - RNA, 20 nt, Artificial Sequence
  RPE65 RNA guide
ugcaagggauagaucaauga

SEQ ID NO: 38397 - RNA, 20 nt, Artificial Sequence
  RPE65 RNA guide
ugcaauugguguaauuuggu

SEQ ID NO: 38398 - RNA, 20 nt, Artificial Sequence
  RPE65 RNA guide
ugcacugauugccucugucu

SEQ ID NO: 38399 - RNA, 20 nt, Artificial Sequence
  RPE65 RNA guide
ugcaggaaagcaucauagac

SEQ ID NO: 38400 - RNA, 20 nt, Artificial Sequence
  RPE65 RNA guide
ugcaguccauuuggagcuug

SEQ ID NO: 38401 - RNA, 20 nt, Artificial Sequence
  RPE65 RNA guide
ugccucugucuaugaugcuu

SEQ ID NO: 38402 - RNA, 20 nt, Artificial Sequence
  RPE65 RNA guide
ugccuuucauagcuuuuaua

SEQ ID NO: 38403 - RNA, 20 nt, Artificial Sequence
  RPE65 RNA guide
ugcgaauguaugauucuaac

SEQ ID NO: 38404 - RNA, 20 nt, Artificial Sequence
  RPE65 RNA guide
ugcuagaugcaagggauaga

SEQ ID NO: 38405 - RNA, 20 nt, Artificial Sequence
  RPE65 RNA guide
ugcuaggauuugaaacuuaa

SEQ ID NO: 38406 - RNA, 20 nt, Artificial Sequence
  RPE65 RNA guide
ugcuaggugauguucaggaa

SEQ ID NO: 38407 - RNA, 20 nt, Artificial Sequence
  RPE65 RNA guide
ugcugcgaauguaugauucu

SEQ ID NO: 38408 - RNA, 20 nt, Artificial Sequence
  RPE65 RNA guide
ugcuuuccugcaauuggugu

SEQ ID NO: 38409 - RNA, 20 nt, Artificial Sequence
  RPE65 RNA guide
uggaaagcacuugauaagua

SEQ ID NO: 38410 - RNA, 20 nt, Artificial Sequence
  RPE65 RNA guide
uggaauggucauucugugug

SEQ ID NO: 38411 - RNA, 20 nt, Artificial Sequence
  RPE65 RNA guide
uggacugcacugauugccuc

SEQ ID NO: 38412 - RNA, 20 nt, Artificial Sequence
  RPE65 RNA guide
uggagagaacccauauaaaa

SEQ ID NO: 38413 - RNA, 20 nt, Artificial Sequence
  RPE65 RNA guide
uggagcuuggaauggucauu

SEQ ID NO: 38414 - RNA, 20 nt, Artificial Sequence
  RPE65 RNA guide
uggauuggagagaacccaua

SEQ ID NO: 38415 - RNA, 20 nt, Artificial Sequence
  RPE65 RNA guide
uggcucucauguucuuuuca

SEQ ID NO: 38416 - RNA, 20 nt, Artificial Sequence
  RPE65 RNA guide
ugggacacagugcuagguga

SEQ ID NO: 38417 - RNA, 20 nt, Artificial Sequence
  RPE65 RNA guide
uggguucucuccaauccaug

SEQ ID NO: 38418 - RNA, 20 nt, Artificial Sequence
  RPE65 RNA guide
uggucauucuguguguccuc

SEQ ID NO: 38419 - RNA, 20 nt, Artificial Sequence
  RPE65 RNA guide
uggucccugccuuucauagc

SEQ ID NO: 38420 - RNA, 20 nt, Artificial Sequence
  RPE65 RNA guide
uggugaaaagaacaugagag

SEQ ID NO: 38421 - RNA, 20 nt, Artificial Sequence
  RPE65 RNA guide
ugguguaauuuggugaaaag

SEQ ID NO: 38422 - RNA, 20 nt, Artificial Sequence
  RPE65 RNA guide
uguaugauucuaacuugaug

SEQ ID NO: 38423 - RNA, 20 nt, Artificial Sequence
  RPE65 RNA guide
ugucaaauagcuagucauug

SEQ ID NO: 38424 - RNA, 20 nt, Artificial Sequence
  RPE65 RNA guide
ugucaacaaugacuagcuau

SEQ ID NO: 38425 - RNA, 20 nt, Artificial Sequence
  RPE65 RNA guide
uguccuaugucaaauagcua

SEQ ID NO: 38426 - RNA, 20 nt, Artificial Sequence
  RPE65 RNA guide
uguccucaucaaguuagaau

SEQ ID NO: 38427 - RNA, 20 nt, Artificial Sequence
  RPE65 RNA guide
ugucuaugaugcuuuccugc

SEQ ID NO: 38428 - RNA, 20 nt, Artificial Sequence
  RPE65 RNA guide
uguggcucucauguucuuuu

SEQ ID NO: 38429 - RNA, 20 nt, Artificial Sequence
  RPE65 RNA guide
uguguccucaucaaguuaga

SEQ ID NO: 38430 - RNA, 20 nt, Artificial Sequence
  RPE65 RNA guide
uguguguccucaucaaguua

SEQ ID NO: 38431 - RNA, 20 nt, Artificial Sequence
  RPE65 RNA guide
uguuacccuacucauugauc

SEQ ID NO: 38432 - RNA, 20 nt, Artificial Sequence
  RPE65 RNA guide
uguuaggcauuuuauauggg

SEQ ID NO: 38433 - RNA, 20 nt, Artificial Sequence
  RPE65 RNA guide
uguucuuuucaccaaauuac

SEQ ID NO: 38434 - RNA, 20 nt, Artificial Sequence
  RPE65 RNA guide
uguugacaaugcuaggauuu

SEQ ID NO: 38435 - RNA, 20 nt, Artificial Sequence
  RPE65 RNA guide
uguuuguccuaugucaaaua

SEQ ID NO: 38436 - RNA, 20 nt, Artificial Sequence
  RPE65 RNA guide
uuaaacacuuacauggauug

SEQ ID NO: 38437 - RNA, 20 nt, Artificial Sequence
  RPE65 RNA guide
uuaauguggcucucauguuc

SEQ ID NO: 38438 - RNA, 20 nt, Artificial Sequence
  RPE65 RNA guide
uuacaccaauugcaggaaag

SEQ ID NO: 38439 - RNA, 20 nt, Artificial Sequence
  RPE65 RNA guide
uuacauggauuggagagaac

SEQ ID NO: 38440 - RNA, 20 nt, Artificial Sequence
  RPE65 RNA guide
uuaccagguucaugcuagcu

SEQ ID NO: 38441 - RNA, 20 nt, Artificial Sequence
  RPE65 RNA guide
uuacccuacucauugaucua

SEQ ID NO: 38442 - RNA, 20 nt, Artificial Sequence
  RPE65 RNA guide
uuagaaucauacauucgcag

SEQ ID NO: 38443 - RNA, 20 nt, Artificial Sequence
  RPE65 RNA guide
uuaggcauuuuauauggguu

SEQ ID NO: 38444 - RNA, 20 nt, Artificial Sequence
  RPE65 RNA guide
uuauaaaagcuaugaaaggc

SEQ ID NO: 38445 - RNA, 20 nt, Artificial Sequence
  RPE65 RNA guide
uuauaagcuagcaugaaccu

SEQ ID NO: 38446 - RNA, 20 nt, Artificial Sequence
  RPE65 RNA guide
uuauauggguucucuccaau

SEQ ID NO: 38447 - RNA, 20 nt, Artificial Sequence
  RPE65 RNA guide
uuaucaagugcuuuccauau

SEQ ID NO: 38448 - RNA, 20 nt, Artificial Sequence
  RPE65 RNA guide
uuaugcuagaugcaagggau

SEQ ID NO: 38449 - RNA, 20 nt, Artificial Sequence
  RPE65 RNA guide
uuauucaugcugcgaaugua

SEQ ID NO: 38450 - RNA, 20 nt, Artificial Sequence
  RPE65 RNA guide
uucaaauccuagcauuguca

SEQ ID NO: 38451 - RNA, 20 nt, Artificial Sequence
  RPE65 RNA guide
uucaccaaauuacaccaauu

SEQ ID NO: 38452 - RNA, 20 nt, Artificial Sequence
  RPE65 RNA guide
uucagaauuuaugcuagaug

SEQ ID NO: 38453 - RNA, 20 nt, Artificial Sequence
  RPE65 RNA guide
uucaugcugcgaauguauga

SEQ ID NO: 38454 - RNA, 20 nt, Artificial Sequence
  RPE65 RNA guide
uuccaagcuccaaauggacu

SEQ ID NO: 38455 - RNA, 20 nt, Artificial Sequence
  RPE65 RNA guide
uuccugaacaucaccuagca

SEQ ID NO: 38456 - RNA, 20 nt, Artificial Sequence
  RPE65 RNA guide
uuccugcaauugguguaauu

SEQ ID NO: 38457 - RNA, 20 nt, Artificial Sequence
  RPE65 RNA guide
uucuaaauuccugaacauca

SEQ ID NO: 38458 - RNA, 20 nt, Artificial Sequence
  RPE65 RNA guide
uucuaacuugaugaggacac

SEQ ID NO: 38459 - RNA, 20 nt, Artificial Sequence
  RPE65 RNA guide
uucucuccaauccauguaag

SEQ ID NO: 38460 - RNA, 20 nt, Artificial Sequence
  RPE65 RNA guide
uucugaauauggaaagcacu

SEQ ID NO: 38461 - RNA, 20 nt, Artificial Sequence
  RPE65 RNA guide
uucuguguguccucaucaag

SEQ ID NO: 38462 - RNA, 20 nt, Artificial Sequence
  RPE65 RNA guide
uugaaacuuaauguggcucu

SEQ ID NO: 38463 - RNA, 20 nt, Artificial Sequence
  RPE65 RNA guide
uugacaaugcuaggauuuga

SEQ ID NO: 38464 - RNA, 20 nt, Artificial Sequence
  RPE65 RNA guide
uugacauaggacaaacauug

SEQ ID NO: 38465 - RNA, 20 nt, Artificial Sequence
  RPE65 RNA guide
uugaucuaucccuugcaucu

SEQ ID NO: 38466 - RNA, 20 nt, Artificial Sequence
  RPE65 RNA guide
uugaugaggacacacagaau

SEQ ID NO: 38467 - RNA, 20 nt, Artificial Sequence
  RPE65 RNA guide
uugcaggaaagcaucauaga

SEQ ID NO: 38468 - RNA, 20 nt, Artificial Sequence
  RPE65 RNA guide
uugccucugucuaugaugcu

SEQ ID NO: 38469 - RNA, 20 nt, Artificial Sequence
  RPE65 RNA guide
uuggaauggucauucugugu

SEQ ID NO: 38470 - RNA, 20 nt, Artificial Sequence
  RPE65 RNA guide
uuggagagaacccauauaaa

SEQ ID NO: 38471 - RNA, 20 nt, Artificial Sequence
  RPE65 RNA guide
uuggagcuuggaauggucau

SEQ ID NO: 38472 - RNA, 20 nt, Artificial Sequence
  RPE65 RNA guide
uuggugaaaagaacaugaga

SEQ ID NO: 38473 - RNA, 20 nt, Artificial Sequence
  RPE65 RNA guide
uugguguaauuuggugaaaa

SEQ ID NO: 38474 - RNA, 20 nt, Artificial Sequence
  RPE65 RNA guide
uugucaacaaugacuagcua

SEQ ID NO: 38475 - RNA, 20 nt, Artificial Sequence
  RPE65 RNA guide
uuguccuaugucaaauagcu

SEQ ID NO: 38476 - RNA, 20 nt, Artificial Sequence
  RPE65 RNA guide
uuguugacaaugcuaggauu

SEQ ID NO: 38477 - RNA, 20 nt, Artificial Sequence
  RPE65 RNA guide
uuuaaacacuuacauggauu

SEQ ID NO: 38478 - RNA, 20 nt, Artificial Sequence
  RPE65 RNA guide
uuuaccagguucaugcuagc

SEQ ID NO: 38479 - RNA, 20 nt, Artificial Sequence
  RPE65 RNA guide
uuuauaagcuagcaugaacc

SEQ ID NO: 38480 - RNA, 20 nt, Artificial Sequence
  RPE65 RNA guide
uuuauauggguucucuccaa

SEQ ID NO: 38481 - RNA, 20 nt, Artificial Sequence
  RPE65 RNA guide
uuuaugcuagaugcaaggga

SEQ ID NO: 38482 - RNA, 20 nt, Artificial Sequence
  RPE65 RNA guide
uuucaaauccuagcauuguc

SEQ ID NO: 38483 - RNA, 20 nt, Artificial Sequence
  RPE65 RNA guide
uuucaccaaauuacaccaau

SEQ ID NO: 38484 - RNA, 20 nt, Artificial Sequence
  RPE65 RNA guide
uuuccugcaauugguguaau

SEQ ID NO: 38485 - RNA, 20 nt, Artificial Sequence
  RPE65 RNA guide
uuugaaacuuaauguggcuc

SEQ ID NO: 38486 - RNA, 20 nt, Artificial Sequence
  RPE65 RNA guide
uuuggagcuuggaaugguca

SEQ ID NO: 38487 - RNA, 20 nt, Artificial Sequence
  RPE65 RNA guide
uuuggugaaaagaacaugag

SEQ ID NO: 38488 - RNA, 20 nt, Artificial Sequence
  RPE65 RNA guide
uuuguccuaugucaaauagc

SEQ ID NO: 38489 - RNA, 20 nt, Artificial Sequence
  RPE65 RNA guide
uuuuauaagcuagcaugaac

SEQ ID NO: 38490 - RNA, 20 nt, Artificial Sequence
  RPE65 RNA guide
uuuuauauggguucucucca

SEQ ID NO: 38491 - RNA, 20 nt, Artificial Sequence
  RPE65 RNA guide
uuuucaccaaauuacaccaa

SEQ ID NO: 38492 - RNA, 21 nt, Artificial Sequence
  RPE65 RNA guide
aaaagaacaugagagccacau

SEQ ID NO: 38493 - RNA, 21 nt, Artificial Sequence
  RPE65 RNA guide
aaaagcuaugaaaggcaggga

SEQ ID NO: 38494 - RNA, 21 nt, Artificial Sequence
  RPE65 RNA guide
aaacacuuacauggauuggag

SEQ ID NO: 38495 - RNA, 21 nt, Artificial Sequence
  RPE65 RNA guide
aaacuuaauguggcucucaug

SEQ ID NO: 38496 - RNA, 21 nt, Artificial Sequence
  RPE65 RNA guide
aaagaacaugagagccacauu

SEQ ID NO: 38497 - RNA, 21 nt, Artificial Sequence
  RPE65 RNA guide
aaagcacuugauaaguauuug

SEQ ID NO: 38498 - RNA, 21 nt, Artificial Sequence
  RPE65 RNA guide
aaagcaucauagacagaggca

SEQ ID NO: 38499 - RNA, 21 nt, Artificial Sequence
  RPE65 RNA guide
aaagcuaugaaaggcagggac

SEQ ID NO: 38500 - RNA, 21 nt, Artificial Sequence
  RPE65 RNA guide
aaaggcagggaccauguuacc

SEQ ID NO: 38501 - RNA, 21 nt, Artificial Sequence
  RPE65 RNA guide
aaauagcuagucauuguugac

SEQ ID NO: 38502 - RNA, 21 nt, Artificial Sequence
  RPE65 RNA guide
aaauccuagcauugucaacaa

SEQ ID NO: 38503 - RNA, 21 nt, Artificial Sequence
  RPE65 RNA guide
aaauggacugcacugauugcc

SEQ ID NO: 38504 - RNA, 21 nt, Artificial Sequence
  RPE65 RNA guide
aaauuacaccaauugcaggaa

SEQ ID NO: 38505 - RNA, 21 nt, Artificial Sequence
  RPE65 RNA guide
aaauuauucaugcugcgaaug

SEQ ID NO: 38506 - RNA, 21 nt, Artificial Sequence
  RPE65 RNA guide
aaauuccugaacaucaccuag

SEQ ID NO: 38507 - RNA, 21 nt, Artificial Sequence
  RPE65 RNA guide
aaauucuaaauuccugaacau

SEQ ID NO: 38508 - RNA, 21 nt, Artificial Sequence
  RPE65 RNA guide
aaauucugaauauggaaagca

SEQ ID NO: 38509 - RNA, 21 nt, Artificial Sequence
  RPE65 RNA guide
aacaaugacuagcuauuugac

SEQ ID NO: 38510 - RNA, 21 nt, Artificial Sequence
  RPE65 RNA guide
aacacuuacauggauuggaga

SEQ ID NO: 38511 - RNA, 21 nt, Artificial Sequence
  RPE65 RNA guide
aacaucaccuagcacuguguc

SEQ ID NO: 38512 - RNA, 21 nt, Artificial Sequence
  RPE65 RNA guide
aacaugagagccacauuaagu

SEQ ID NO: 38513 - RNA, 21 nt, Artificial Sequence
  RPE65 RNA guide
aacauggucccugccuuucau

SEQ ID NO: 38514 - RNA, 21 nt, Artificial Sequence
  RPE65 RNA guide
aacuuaauguggcucucaugu

SEQ ID NO: 38515 - RNA, 21 nt, Artificial Sequence
  RPE65 RNA guide
aacuugaugaggacacacaga

SEQ ID NO: 38516 - RNA, 21 nt, Artificial Sequence
  RPE65 RNA guide
aagaaacaauguuuguccuau

SEQ ID NO: 38517 - RNA, 21 nt, Artificial Sequence
  RPE65 RNA guide
aagaacaugagagccacauua

SEQ ID NO: 38518 - RNA, 21 nt, Artificial Sequence
  RPE65 RNA guide
aagcacuugauaaguauuugu

SEQ ID NO: 38519 - RNA, 21 nt, Artificial Sequence
  RPE65 RNA guide
aagcaucauagacagaggcaa

SEQ ID NO: 38520 - RNA, 21 nt, Artificial Sequence
  RPE65 RNA guide
aagcuagcaugaaccugguaa

SEQ ID NO: 38521 - RNA, 21 nt, Artificial Sequence
  RPE65 RNA guide
aagcuaugaaaggcagggacc

SEQ ID NO: 38522 - RNA, 21 nt, Artificial Sequence
  RPE65 RNA guide
aagcuccaaauggacugcacu

SEQ ID NO: 38523 - RNA, 21 nt, Artificial Sequence
  RPE65 RNA guide
aaggcagggaccauguuaccc

SEQ ID NO: 38524 - RNA, 21 nt, Artificial Sequence
  RPE65 RNA guide
aagggauagaucaaugaguag

SEQ ID NO: 38525 - RNA, 21 nt, Artificial Sequence
  RPE65 RNA guide
aaguuagaaucauacauucgc

SEQ ID NO: 38526 - RNA, 21 nt, Artificial Sequence
  RPE65 RNA guide
aaguuucaaauccuagcauug

SEQ ID NO: 38527 - RNA, 21 nt, Artificial Sequence
  RPE65 RNA guide
aauagcuagucauuguugaca

SEQ ID NO: 38528 - RNA, 21 nt, Artificial Sequence
  RPE65 RNA guide
aaucagugcaguccauuugga

SEQ ID NO: 38529 - RNA, 21 nt, Artificial Sequence
  RPE65 RNA guide
aaucauacauucgcagcauga

SEQ ID NO: 38530 - RNA, 21 nt, Artificial Sequence
  RPE65 RNA guide
aauccuagcauugucaacaau

SEQ ID NO: 38531 - RNA, 21 nt, Artificial Sequence
  RPE65 RNA guide
aaugaccauuccaagcuccaa

SEQ ID NO: 38532 - RNA, 21 nt, Artificial Sequence
  RPE65 RNA guide
aaugacuagcuauuugacaua

SEQ ID NO: 38533 - RNA, 21 nt, Artificial Sequence
  RPE65 RNA guide
aaugaguaggguaacaugguc

SEQ ID NO: 38534 - RNA, 21 nt, Artificial Sequence
  RPE65 RNA guide
aauggacugcacugauugccu

SEQ ID NO: 38535 - RNA, 21 nt, Artificial Sequence
  RPE65 RNA guide
aauggucauucuguguguccu

SEQ ID NO: 38536 - RNA, 21 nt, Artificial Sequence
  RPE65 RNA guide
aauguaugauucuaacuugau

SEQ ID NO: 38537 - RNA, 21 nt, Artificial Sequence
  RPE65 RNA guide
aauguggcucucauguucuuu

SEQ ID NO: 38538 - RNA, 21 nt, Artificial Sequence
  RPE65 RNA guide
aauguuuguccuaugucaaau

SEQ ID NO: 38539 - RNA, 21 nt, Artificial Sequence
  RPE65 RNA guide
aauuacaccaauugcaggaaa

SEQ ID NO: 38540 - RNA, 21 nt, Artificial Sequence
  RPE65 RNA guide
aauuauucaugcugcgaaugu

SEQ ID NO: 38541 - RNA, 21 nt, Artificial Sequence
  RPE65 RNA guide
aauuccugaacaucaccuagc

SEQ ID NO: 38542 - RNA, 21 nt, Artificial Sequence
  RPE65 RNA guide
aauucuaaauuccugaacauc

SEQ ID NO: 38543 - RNA, 21 nt, Artificial Sequence
  RPE65 RNA guide
aauucugaauauggaaagcac

SEQ ID NO: 38544 - RNA, 21 nt, Artificial Sequence
  RPE65 RNA guide
aauugcaggaaagcaucauag

SEQ ID NO: 38545 - RNA, 21 nt, Artificial Sequence
  RPE65 RNA guide
aauuuaugcuagaugcaaggg

SEQ ID NO: 38546 - RNA, 21 nt, Artificial Sequence
  RPE65 RNA guide
aauuuggugaaaagaacauga

SEQ ID NO: 38547 - RNA, 21 nt, Artificial Sequence
  RPE65 RNA guide
acaaauacuuaucaagugcuu

SEQ ID NO: 38548 - RNA, 21 nt, Artificial Sequence
  RPE65 RNA guide
acaaugacuagcuauuugaca

SEQ ID NO: 38549 - RNA, 21 nt, Artificial Sequence
  RPE65 RNA guide
acaauguuuguccuaugucaa

SEQ ID NO: 38550 - RNA, 21 nt, Artificial Sequence
  RPE65 RNA guide
acacaaauacuuaucaagugc

SEQ ID NO: 38551 - RNA, 21 nt, Artificial Sequence
  RPE65 RNA guide
acacacagaaugaccauucca

SEQ ID NO: 38552 - RNA, 21 nt, Artificial Sequence
  RPE65 RNA guide
acacagaaugaccauuccaag

SEQ ID NO: 38553 - RNA, 21 nt, Artificial Sequence
  RPE65 RNA guide
acacagugcuaggugauguuc

SEQ ID NO: 38554 - RNA, 21 nt, Artificial Sequence
  RPE65 RNA guide
acaccaauugcaggaaagcau

SEQ ID NO: 38555 - RNA, 21 nt, Artificial Sequence
  RPE65 RNA guide
acacuuacauggauuggagag

SEQ ID NO: 38556 - RNA, 21 nt, Artificial Sequence
  RPE65 RNA guide
acagaaugaccauuccaagcu

SEQ ID NO: 38557 - RNA, 21 nt, Artificial Sequence
  RPE65 RNA guide
acagaggcaaucagugcaguc

SEQ ID NO: 38558 - RNA, 21 nt, Artificial Sequence
  RPE65 RNA guide
acagugcuaggugauguucag

SEQ ID NO: 38559 - RNA, 21 nt, Artificial Sequence
  RPE65 RNA guide
acauaaauuauucaugcugcg

SEQ ID NO: 38560 - RNA, 21 nt, Artificial Sequence
  RPE65 RNA guide
acauaggacaaacauuguuuc

SEQ ID NO: 38561 - RNA, 21 nt, Artificial Sequence
  RPE65 RNA guide
acaugagagccacauuaaguu

SEQ ID NO: 38562 - RNA, 21 nt, Artificial Sequence
  RPE65 RNA guide
acauggauuggagagaaccca

SEQ ID NO: 38563 - RNA, 21 nt, Artificial Sequence
  RPE65 RNA guide
acauggucccugccuuucaua

SEQ ID NO: 38564 - RNA, 21 nt, Artificial Sequence
  RPE65 RNA guide
acauucgcagcaugaauaauu

SEQ ID NO: 38565 - RNA, 21 nt, Artificial Sequence
  RPE65 RNA guide
accaaauuacaccaauugcag

SEQ ID NO: 38566 - RNA, 21 nt, Artificial Sequence
  RPE65 RNA guide
accaauugcaggaaagcauca

SEQ ID NO: 38567 - RNA, 21 nt, Artificial Sequence
  RPE65 RNA guide
accagguucaugcuagcuuau

SEQ ID NO: 38568 - RNA, 21 nt, Artificial Sequence
  RPE65 RNA guide
accauguuacccuacucauug

SEQ ID NO: 38569 - RNA, 21 nt, Artificial Sequence
  RPE65 RNA guide
accauuccaagcuccaaaugg

SEQ ID NO: 38570 - RNA, 21 nt, Artificial Sequence
  RPE65 RNA guide
acccaguauuuaccagguuca

SEQ ID NO: 38571 - RNA, 21 nt, Artificial Sequence
  RPE65 RNA guide
acccuacucauugaucuaucc

SEQ ID NO: 38572 - RNA, 21 nt, Artificial Sequence
  RPE65 RNA guide
acuagcuauuugacauaggac

SEQ ID NO: 38573 - RNA, 21 nt, Artificial Sequence
  RPE65 RNA guide
acucauugaucuaucccuugc

SEQ ID NO: 38574 - RNA, 21 nt, Artificial Sequence
  RPE65 RNA guide
acugauugccucugucuauga

SEQ ID NO: 38575 - RNA, 21 nt, Artificial Sequence
  RPE65 RNA guide
acugcacugauugccucuguc

SEQ ID NO: 38576 - RNA, 21 nt, Artificial Sequence
  RPE65 RNA guide
acuuaauguggcucucauguu

SEQ ID NO: 38577 - RNA, 21 nt, Artificial Sequence
  RPE65 RNA guide
acuuacauggauuggagagaa

SEQ ID NO: 38578 - RNA, 21 nt, Artificial Sequence
  RPE65 RNA guide
acuuaucaagugcuuuccaua

SEQ ID NO: 38579 - RNA, 21 nt, Artificial Sequence
  RPE65 RNA guide
acuugaugaggacacacagaa

SEQ ID NO: 38580 - RNA, 21 nt, Artificial Sequence
  RPE65 RNA guide
agaaacaauguuuguccuaug

SEQ ID NO: 38581 - RNA, 21 nt, Artificial Sequence
  RPE65 RNA guide
agaacaugagagccacauuaa

SEQ ID NO: 38582 - RNA, 21 nt, Artificial Sequence
  RPE65 RNA guide
agaacccauauaaaaugccua

SEQ ID NO: 38583 - RNA, 21 nt, Artificial Sequence
  RPE65 RNA guide
agaaucauacauucgcagcau

SEQ ID NO: 38584 - RNA, 21 nt, Artificial Sequence
  RPE65 RNA guide
agaaugaccauuccaagcucc

SEQ ID NO: 38585 - RNA, 21 nt, Artificial Sequence
  RPE65 RNA guide
agaauuuaugcuagaugcaag

SEQ ID NO: 38586 - RNA, 21 nt, Artificial Sequence
  RPE65 RNA guide
agacagaggcaaucagugcag

SEQ ID NO: 38587 - RNA, 21 nt, Artificial Sequence
  RPE65 RNA guide
agagaacccauauaaaaugcc

SEQ ID NO: 38588 - RNA, 21 nt, Artificial Sequence
  RPE65 RNA guide
agagaugaagaaacaauguuu

SEQ ID NO: 38589 - RNA, 21 nt, Artificial Sequence
  RPE65 RNA guide
agagccacauuaaguuucaaa

SEQ ID NO: 38590 - RNA, 21 nt, Artificial Sequence
  RPE65 RNA guide
agaggcaaucagugcagucca

SEQ ID NO: 38591 - RNA, 21 nt, Artificial Sequence
  RPE65 RNA guide
agaucaaugaguaggguaaca

SEQ ID NO: 38592 - RNA, 21 nt, Artificial Sequence
  RPE65 RNA guide
agaugaagaaacaauguuugu

SEQ ID NO: 38593 - RNA, 21 nt, Artificial Sequence
  RPE65 RNA guide
agaugcaagggauagaucaau

SEQ ID NO: 38594 - RNA, 21 nt, Artificial Sequence
  RPE65 RNA guide
agcacccaguauuuaccaggu

SEQ ID NO: 38595 - RNA, 21 nt, Artificial Sequence
  RPE65 RNA guide
agcacuugauaaguauuugug

SEQ ID NO: 38596 - RNA, 21 nt, Artificial Sequence
  RPE65 RNA guide
agcauaaauucugaauaugga

SEQ ID NO: 38597 - RNA, 21 nt, Artificial Sequence
  RPE65 RNA guide
agcaucauagacagaggcaau

SEQ ID NO: 38598 - RNA, 21 nt, Artificial Sequence
  RPE65 RNA guide
agcaugaaccugguaaauacu

SEQ ID NO: 38599 - RNA, 21 nt, Artificial Sequence
  RPE65 RNA guide
agcauugucaacaaugacuag

SEQ ID NO: 38600 - RNA, 21 nt, Artificial Sequence
  RPE65 RNA guide
agccacauuaaguuucaaauc

SEQ ID NO: 38601 - RNA, 21 nt, Artificial Sequence
  RPE65 RNA guide
agcuagcaugaaccugguaaa

SEQ ID NO: 38602 - RNA, 21 nt, Artificial Sequence
  RPE65 RNA guide
agcuagucauuguugacaaug

SEQ ID NO: 38603 - RNA, 21 nt, Artificial Sequence
  RPE65 RNA guide
agcuaugaaaggcagggacca

SEQ ID NO: 38604 - RNA, 21 nt, Artificial Sequence
  RPE65 RNA guide
agcuauuugacauaggacaaa

SEQ ID NO: 38605 - RNA, 21 nt, Artificial Sequence
  RPE65 RNA guide
agcuccaaauggacugcacug

SEQ ID NO: 38606 - RNA, 21 nt, Artificial Sequence
  RPE65 RNA guide
agcuuauaaaagcuaugaaag

SEQ ID NO: 38607 - RNA, 21 nt, Artificial Sequence
  RPE65 RNA guide
agcuuggaauggucauucugu

SEQ ID NO: 38608 - RNA, 21 nt, Artificial Sequence
  RPE65 RNA guide
agcuuuuauaagcuagcauga

SEQ ID NO: 38609 - RNA, 21 nt, Artificial Sequence
  RPE65 RNA guide
aggaaagcaucauagacagag

SEQ ID NO: 38610 - RNA, 21 nt, Artificial Sequence
  RPE65 RNA guide
aggacaaacauuguuucuuca

SEQ ID NO: 38611 - RNA, 21 nt, Artificial Sequence
  RPE65 RNA guide
aggacacacagaaugaccauu

SEQ ID NO: 38612 - RNA, 21 nt, Artificial Sequence
  RPE65 RNA guide
aggauuugaaacuuaaugugg

SEQ ID NO: 38613 - RNA, 21 nt, Artificial Sequence
  RPE65 RNA guide
aggcaaucagugcaguccauu

SEQ ID NO: 38614 - RNA, 21 nt, Artificial Sequence
  RPE65 RNA guide
aggcagggaccauguuacccu

SEQ ID NO: 38615 - RNA, 21 nt, Artificial Sequence
  RPE65 RNA guide
aggcauuuuauauggguucuc

SEQ ID NO: 38616 - RNA, 21 nt, Artificial Sequence
  RPE65 RNA guide
agggaccauguuacccuacuc

SEQ ID NO: 38617 - RNA, 21 nt, Artificial Sequence
  RPE65 RNA guide
agggauagaucaaugaguagg

SEQ ID NO: 38618 - RNA, 21 nt, Artificial Sequence
  RPE65 RNA guide
aggguaacauggucccugccu

SEQ ID NO: 38619 - RNA, 21 nt, Artificial Sequence
  RPE65 RNA guide
aggugauguucaggaauuuag

SEQ ID NO: 38620 - RNA, 21 nt, Artificial Sequence
  RPE65 RNA guide
agguucaugcuagcuuauaaa

SEQ ID NO: 38621 - RNA, 21 nt, Artificial Sequence
  RPE65 RNA guide
aguaggguaacauggucccug

SEQ ID NO: 38622 - RNA, 21 nt, Artificial Sequence
  RPE65 RNA guide
aguauuuaccagguucaugcu

SEQ ID NO: 38623 - RNA, 21 nt, Artificial Sequence
  RPE65 RNA guide
agucauuguugacaaugcuag

SEQ ID NO: 38624 - RNA, 21 nt, Artificial Sequence
  RPE65 RNA guide
aguccauuuggagcuuggaau

SEQ ID NO: 38625 - RNA, 21 nt, Artificial Sequence
  RPE65 RNA guide
agugcaguccauuuggagcuu

SEQ ID NO: 38626 - RNA, 21 nt, Artificial Sequence
  RPE65 RNA guide
agugcuaggugauguucagga

SEQ ID NO: 38627 - RNA, 21 nt, Artificial Sequence
  RPE65 RNA guide
aguuagaaucauacauucgca

SEQ ID NO: 38628 - RNA, 21 nt, Artificial Sequence
  RPE65 RNA guide
aguuccaaauucuaaauuccu

SEQ ID NO: 38629 - RNA, 21 nt, Artificial Sequence
  RPE65 RNA guide
aguuucaaauccuagcauugu

SEQ ID NO: 38630 - RNA, 21 nt, Artificial Sequence
  RPE65 RNA guide
auaaaagcuaugaaaggcagg

SEQ ID NO: 38631 - RNA, 21 nt, Artificial Sequence
  RPE65 RNA guide
auaagcuagcaugaaccuggu

SEQ ID NO: 38632 - RNA, 21 nt, Artificial Sequence
  RPE65 RNA guide
auagacagaggcaaucagugc

SEQ ID NO: 38633 - RNA, 21 nt, Artificial Sequence
  RPE65 RNA guide
auagaucaaugaguaggguaa

SEQ ID NO: 38634 - RNA, 21 nt, Artificial Sequence
  RPE65 RNA guide
auagcuagucauuguugacaa

SEQ ID NO: 38635 - RNA, 21 nt, Artificial Sequence
  RPE65 RNA guide
auagcuuuuauaagcuagcau

SEQ ID NO: 38636 - RNA, 21 nt, Artificial Sequence
  RPE65 RNA guide
auaggacaaacauuguuucuu

SEQ ID NO: 38637 - RNA, 21 nt, Artificial Sequence
  RPE65 RNA guide
auauggguucucuccaaucca

SEQ ID NO: 38638 - RNA, 21 nt, Artificial Sequence
  RPE65 RNA guide
aucaagugcuuuccauauuca

SEQ ID NO: 38639 - RNA, 21 nt, Artificial Sequence
  RPE65 RNA guide
aucaaguuagaaucauacauu

SEQ ID NO: 38640 - RNA, 21 nt, Artificial Sequence
  RPE65 RNA guide
aucaaugaguaggguaacaug

SEQ ID NO: 38641 - RNA, 21 nt, Artificial Sequence
  RPE65 RNA guide
aucagugcaguccauuuggag

SEQ ID NO: 38642 - RNA, 21 nt, Artificial Sequence
  RPE65 RNA guide
aucauacauucgcagcaugaa

SEQ ID NO: 38643 - RNA, 21 nt, Artificial Sequence
  RPE65 RNA guide
aucauagacagaggcaaucag

SEQ ID NO: 38644 - RNA, 21 nt, Artificial Sequence
  RPE65 RNA guide
aucccuugcaucuagcauaaa

SEQ ID NO: 38645 - RNA, 21 nt, Artificial Sequence
  RPE65 RNA guide
auccuagcauugucaacaaug

SEQ ID NO: 38646 - RNA, 21 nt, Artificial Sequence
  RPE65 RNA guide
aucuaucccuugcaucuagca

SEQ ID NO: 38647 - RNA, 21 nt, Artificial Sequence
  RPE65 RNA guide
augaaaggcagggaccauguu

SEQ ID NO: 38648 - RNA, 21 nt, Artificial Sequence
  RPE65 RNA guide
augaaccugguaaauacuggg

SEQ ID NO: 38649 - RNA, 21 nt, Artificial Sequence
  RPE65 RNA guide
augaagaaacaauguuugucc

SEQ ID NO: 38650 - RNA, 21 nt, Artificial Sequence
  RPE65 RNA guide
augacacaaauacuuaucaag

SEQ ID NO: 38651 - RNA, 21 nt, Artificial Sequence
  RPE65 RNA guide
augaccauuccaagcuccaaa

SEQ ID NO: 38652 - RNA, 21 nt, Artificial Sequence
  RPE65 RNA guide
augacuagcuauuugacauag

SEQ ID NO: 38653 - RNA, 21 nt, Artificial Sequence
  RPE65 RNA guide
augagagccacauuaaguuuc

SEQ ID NO: 38654 - RNA, 21 nt, Artificial Sequence
  RPE65 RNA guide
augaggacacacagaaugacc

SEQ ID NO: 38655 - RNA, 21 nt, Artificial Sequence
  RPE65 RNA guide
augaguaggguaacauggucc

SEQ ID NO: 38656 - RNA, 21 nt, Artificial Sequence
  RPE65 RNA guide
augaugcuuuccugcaauugg

SEQ ID NO: 38657 - RNA, 21 nt, Artificial Sequence
  RPE65 RNA guide
augauucuaacuugaugagga

SEQ ID NO: 38658 - RNA, 21 nt, Artificial Sequence
  RPE65 RNA guide
augcaagggauagaucaauga

SEQ ID NO: 38659 - RNA, 21 nt, Artificial Sequence
  RPE65 RNA guide
augcuagaugcaagggauaga

SEQ ID NO: 38660 - RNA, 21 nt, Artificial Sequence
  RPE65 RNA guide
augcuaggauuugaaacuuaa

SEQ ID NO: 38661 - RNA, 21 nt, Artificial Sequence
  RPE65 RNA guide
augcugcgaauguaugauucu

SEQ ID NO: 38662 - RNA, 21 nt, Artificial Sequence
  RPE65 RNA guide
augcuuuccugcaauuggugu

SEQ ID NO: 38663 - RNA, 21 nt, Artificial Sequence
  RPE65 RNA guide
auggaaagcacuugauaagua

SEQ ID NO: 38664 - RNA, 21 nt, Artificial Sequence
  RPE65 RNA guide
auggacugcacugauugccuc

SEQ ID NO: 38665 - RNA, 21 nt, Artificial Sequence
  RPE65 RNA guide
auggauuggagagaacccaua

SEQ ID NO: 38666 - RNA, 21 nt, Artificial Sequence
  RPE65 RNA guide
auggguucucuccaauccaug

SEQ ID NO: 38667 - RNA, 21 nt, Artificial Sequence
  RPE65 RNA guide
auggucauucuguguguccuc

SEQ ID NO: 38668 - RNA, 21 nt, Artificial Sequence
  RPE65 RNA guide
auggucccugccuuucauagc

SEQ ID NO: 38669 - RNA, 21 nt, Artificial Sequence
  RPE65 RNA guide
auguaugauucuaacuugaug

SEQ ID NO: 38670 - RNA, 21 nt, Artificial Sequence
  RPE65 RNA guide
augucaaauagcuagucauug

SEQ ID NO: 38671 - RNA, 21 nt, Artificial Sequence
  RPE65 RNA guide
auguggcucucauguucuuuu

SEQ ID NO: 38672 - RNA, 21 nt, Artificial Sequence
  RPE65 RNA guide
auguuacccuacucauugauc

SEQ ID NO: 38673 - RNA, 21 nt, Artificial Sequence
  RPE65 RNA guide
auguuaggcauuuuauauggg

SEQ ID NO: 38674 - RNA, 21 nt, Artificial Sequence
  RPE65 RNA guide
auguucuuuucaccaaauuac

SEQ ID NO: 38675 - RNA, 21 nt, Artificial Sequence
  RPE65 RNA guide
auguuuguccuaugucaaaua

SEQ ID NO: 38676 - RNA, 21 nt, Artificial Sequence
  RPE65 RNA guide
auuacaccaauugcaggaaag

SEQ ID NO: 38677 - RNA, 21 nt, Artificial Sequence
  RPE65 RNA guide
auuauucaugcugcgaaugua

SEQ ID NO: 38678 - RNA, 21 nt, Artificial Sequence
  RPE65 RNA guide
auucagaauuuaugcuagaug

SEQ ID NO: 38679 - RNA, 21 nt, Artificial Sequence
  RPE65 RNA guide
auucaugcugcgaauguauga

SEQ ID NO: 38680 - RNA, 21 nt, Artificial Sequence
  RPE65 RNA guide
auuccaagcuccaaauggacu

SEQ ID NO: 38681 - RNA, 21 nt, Artificial Sequence
  RPE65 RNA guide
auuccugaacaucaccuagca

SEQ ID NO: 38682 - RNA, 21 nt, Artificial Sequence
  RPE65 RNA guide
auucuaaauuccugaacauca

SEQ ID NO: 38683 - RNA, 21 nt, Artificial Sequence
  RPE65 RNA guide
auucuaacuugaugaggacac

SEQ ID NO: 38684 - RNA, 21 nt, Artificial Sequence
  RPE65 RNA guide
auucugaauauggaaagcacu

SEQ ID NO: 38685 - RNA, 21 nt, Artificial Sequence
  RPE65 RNA guide
auucuguguguccucaucaag

SEQ ID NO: 38686 - RNA, 21 nt, Artificial Sequence
  RPE65 RNA guide
auugaucuaucccuugcaucu

SEQ ID NO: 38687 - RNA, 21 nt, Artificial Sequence
  RPE65 RNA guide
auugcaggaaagcaucauaga

SEQ ID NO: 38688 - RNA, 21 nt, Artificial Sequence
  RPE65 RNA guide
auugccucugucuaugaugcu

SEQ ID NO: 38689 - RNA, 21 nt, Artificial Sequence
  RPE65 RNA guide
auuggagagaacccauauaaa

SEQ ID NO: 38690 - RNA, 21 nt, Artificial Sequence
  RPE65 RNA guide
auugguguaauuuggugaaaa

SEQ ID NO: 38691 - RNA, 21 nt, Artificial Sequence
  RPE65 RNA guide
auugucaacaaugacuagcua

SEQ ID NO: 38692 - RNA, 21 nt, Artificial Sequence
  RPE65 RNA guide
auuguugacaaugcuaggauu

SEQ ID NO: 38693 - RNA, 21 nt, Artificial Sequence
  RPE65 RNA guide
auuuaccagguucaugcuagc

SEQ ID NO: 38694 - RNA, 21 nt, Artificial Sequence
  RPE65 RNA guide
auuuaugcuagaugcaaggga

SEQ ID NO: 38695 - RNA, 21 nt, Artificial Sequence
  RPE65 RNA guide
auuugaaacuuaauguggcuc

SEQ ID NO: 38696 - RNA, 21 nt, Artificial Sequence
  RPE65 RNA guide
auuuggagcuuggaaugguca

SEQ ID NO: 38697 - RNA, 21 nt, Artificial Sequence
  RPE65 RNA guide
auuuggugaaaagaacaugag

SEQ ID NO: 38698 - RNA, 21 nt, Artificial Sequence
  RPE65 RNA guide
auuuuauauggguucucucca

SEQ ID NO: 38699 - RNA, 21 nt, Artificial Sequence
  RPE65 RNA guide
caaauacuuaucaagugcuuu

SEQ ID NO: 38700 - RNA, 21 nt, Artificial Sequence
  RPE65 RNA guide
caaauagcuagucauuguuga

SEQ ID NO: 38701 - RNA, 21 nt, Artificial Sequence
  RPE65 RNA guide
caaauccuagcauugucaaca

SEQ ID NO: 38702 - RNA, 21 nt, Artificial Sequence
  RPE65 RNA guide
caaauggacugcacugauugc

SEQ ID NO: 38703 - RNA, 21 nt, Artificial Sequence
  RPE65 RNA guide
caaauuacaccaauugcagga

SEQ ID NO: 38704 - RNA, 21 nt, Artificial Sequence
  RPE65 RNA guide
caaauucuaaauuccugaaca

SEQ ID NO: 38705 - RNA, 21 nt, Artificial Sequence
  RPE65 RNA guide
caacaaugacuagcuauuuga

SEQ ID NO: 38706 - RNA, 21 nt, Artificial Sequence
  RPE65 RNA guide
caacauaaauuauucaugcug

SEQ ID NO: 38707 - RNA, 21 nt, Artificial Sequence
  RPE65 RNA guide
caagcuccaaauggacugcac

SEQ ID NO: 38708 - RNA, 21 nt, Artificial Sequence
  RPE65 RNA guide
caagggauagaucaaugagua

SEQ ID NO: 38709 - RNA, 21 nt, Artificial Sequence
  RPE65 RNA guide
caagugcuuuccauauucaga

SEQ ID NO: 38710 - RNA, 21 nt, Artificial Sequence
  RPE65 RNA guide
caaguuagaaucauacauucg

SEQ ID NO: 38711 - RNA, 21 nt, Artificial Sequence
  RPE65 RNA guide
caaucagugcaguccauuugg

SEQ ID NO: 38712 - RNA, 21 nt, Artificial Sequence
  RPE65 RNA guide
caaugacuagcuauuugacau

SEQ ID NO: 38713 - RNA, 21 nt, Artificial Sequence
  RPE65 RNA guide
caaugaguaggguaacauggu

SEQ ID NO: 38714 - RNA, 21 nt, Artificial Sequence
  RPE65 RNA guide
caaugcuaggauuugaaacuu

SEQ ID NO: 38715 - RNA, 21 nt, Artificial Sequence
  RPE65 RNA guide
caauguuuguccuaugucaaa

SEQ ID NO: 38716 - RNA, 21 nt, Artificial Sequence
  RPE65 RNA guide
caauugcaggaaagcaucaua

SEQ ID NO: 38717 - RNA, 21 nt, Artificial Sequence
  RPE65 RNA guide
caauugguguaauuuggugaa

SEQ ID NO: 38718 - RNA, 21 nt, Artificial Sequence
  RPE65 RNA guide
cacaaauacuuaucaagugcu

SEQ ID NO: 38719 - RNA, 21 nt, Artificial Sequence
  RPE65 RNA guide
cacacagaaugaccauuccaa

SEQ ID NO: 38720 - RNA, 21 nt, Artificial Sequence
  RPE65 RNA guide
cacagaaugaccauuccaagc

SEQ ID NO: 38721 - RNA, 21 nt, Artificial Sequence
  RPE65 RNA guide
cacagugcuaggugauguuca

SEQ ID NO: 38722 - RNA, 21 nt, Artificial Sequence
  RPE65 RNA guide
cacauuaaguuucaaauccua

SEQ ID NO: 38723 - RNA, 21 nt, Artificial Sequence
  RPE65 RNA guide
caccaaauuacaccaauugca

SEQ ID NO: 38724 - RNA, 21 nt, Artificial Sequence
  RPE65 RNA guide
caccaauugcaggaaagcauc

SEQ ID NO: 38725 - RNA, 21 nt, Artificial Sequence
  RPE65 RNA guide
cacccaguauuuaccagguuc

SEQ ID NO: 38726 - RNA, 21 nt, Artificial Sequence
  RPE65 RNA guide
cacugauugccucugucuaug

SEQ ID NO: 38727 - RNA, 21 nt, Artificial Sequence
  RPE65 RNA guide
cacuuacauggauuggagaga

SEQ ID NO: 38728 - RNA, 21 nt, Artificial Sequence
  RPE65 RNA guide
cacuugauaaguauuuguguc

SEQ ID NO: 38729 - RNA, 21 nt, Artificial Sequence
  RPE65 RNA guide
cagaaugaccauuccaagcuc

SEQ ID NO: 38730 - RNA, 21 nt, Artificial Sequence
  RPE65 RNA guide
cagaauuuaugcuagaugcaa

SEQ ID NO: 38731 - RNA, 21 nt, Artificial Sequence
  RPE65 RNA guide
cagaggcaaucagugcagucc

SEQ ID NO: 38732 - RNA, 21 nt, Artificial Sequence
  RPE65 RNA guide
caggaaagcaucauagacaga

SEQ ID NO: 38733 - RNA, 21 nt, Artificial Sequence
  RPE65 RNA guide
cagggaccauguuacccuacu

SEQ ID NO: 38734 - RNA, 21 nt, Artificial Sequence
  RPE65 RNA guide
cagguucaugcuagcuuauaa

SEQ ID NO: 38735 - RNA, 21 nt, Artificial Sequence
  RPE65 RNA guide
caguauuuaccagguucaugc

SEQ ID NO: 38736 - RNA, 21 nt, Artificial Sequence
  RPE65 RNA guide
caguccauuuggagcuuggaa

SEQ ID NO: 38737 - RNA, 21 nt, Artificial Sequence
  RPE65 RNA guide
cagugcaguccauuuggagcu

SEQ ID NO: 38738 - RNA, 21 nt, Artificial Sequence
  RPE65 RNA guide
cagugcuaggugauguucagg

SEQ ID NO: 38739 - RNA, 21 nt, Artificial Sequence
  RPE65 RNA guide
cauaaauuauucaugcugcga

SEQ ID NO: 38740 - RNA, 21 nt, Artificial Sequence
  RPE65 RNA guide
cauaaauucugaauauggaaa

SEQ ID NO: 38741 - RNA, 21 nt, Artificial Sequence
  RPE65 RNA guide
cauacauucgcagcaugaaua

SEQ ID NO: 38742 - RNA, 21 nt, Artificial Sequence
  RPE65 RNA guide
cauagacagaggcaaucagug

SEQ ID NO: 38743 - RNA, 21 nt, Artificial Sequence
  RPE65 RNA guide
cauagcuuuuauaagcuagca

SEQ ID NO: 38744 - RNA, 21 nt, Artificial Sequence
  RPE65 RNA guide
cauaggacaaacauuguuucu

SEQ ID NO: 38745 - RNA, 21 nt, Artificial Sequence
  RPE65 RNA guide
cauauucagaauuuaugcuag

SEQ ID NO: 38746 - RNA, 21 nt, Artificial Sequence
  RPE65 RNA guide
caucaaguuagaaucauacau

SEQ ID NO: 38747 - RNA, 21 nt, Artificial Sequence
  RPE65 RNA guide
caucauagacagaggcaauca

SEQ ID NO: 38748 - RNA, 21 nt, Artificial Sequence
  RPE65 RNA guide
caucuagcauaaauucugaau

SEQ ID NO: 38749 - RNA, 21 nt, Artificial Sequence
  RPE65 RNA guide
caugaaccugguaaauacugg

SEQ ID NO: 38750 - RNA, 21 nt, Artificial Sequence
  RPE65 RNA guide
caugacacaaauacuuaucaa

SEQ ID NO: 38751 - RNA, 21 nt, Artificial Sequence
  RPE65 RNA guide
caugagagccacauuaaguuu

SEQ ID NO: 38752 - RNA, 21 nt, Artificial Sequence
  RPE65 RNA guide
caugcuagcuuauaaaagcua

SEQ ID NO: 38753 - RNA, 21 nt, Artificial Sequence
  RPE65 RNA guide
caugcugcgaauguaugauuc

SEQ ID NO: 38754 - RNA, 21 nt, Artificial Sequence
  RPE65 RNA guide
cauggauuggagagaacccau

SEQ ID NO: 38755 - RNA, 21 nt, Artificial Sequence
  RPE65 RNA guide
cauggucccugccuuucauag

SEQ ID NO: 38756 - RNA, 21 nt, Artificial Sequence
  RPE65 RNA guide
cauguuacccuacucauugau

SEQ ID NO: 38757 - RNA, 21 nt, Artificial Sequence
  RPE65 RNA guide
cauguucuuuucaccaaauua

SEQ ID NO: 38758 - RNA, 21 nt, Artificial Sequence
  RPE65 RNA guide
cauuaaguuucaaauccuagc

SEQ ID NO: 38759 - RNA, 21 nt, Artificial Sequence
  RPE65 RNA guide
cauuccaagcuccaaauggac

SEQ ID NO: 38760 - RNA, 21 nt, Artificial Sequence
  RPE65 RNA guide
cauucgcagcaugaauaauuu

SEQ ID NO: 38761 - RNA, 21 nt, Artificial Sequence
  RPE65 RNA guide
cauucuguguguccucaucaa

SEQ ID NO: 38762 - RNA, 21 nt, Artificial Sequence
  RPE65 RNA guide
cauugaucuaucccuugcauc

SEQ ID NO: 38763 - RNA, 21 nt, Artificial Sequence
  RPE65 RNA guide
cauugucaacaaugacuagcu

SEQ ID NO: 38764 - RNA, 21 nt, Artificial Sequence
  RPE65 RNA guide
cauuguugacaaugcuaggau

SEQ ID NO: 38765 - RNA, 21 nt, Artificial Sequence
  RPE65 RNA guide
cauuuggagcuuggaaugguc

SEQ ID NO: 38766 - RNA, 21 nt, Artificial Sequence
  RPE65 RNA guide
cauuuuauauggguucucucc

SEQ ID NO: 38767 - RNA, 21 nt, Artificial Sequence
  RPE65 RNA guide
ccaaauggacugcacugauug

SEQ ID NO: 38768 - RNA, 21 nt, Artificial Sequence
  RPE65 RNA guide
ccaaauuacaccaauugcagg

SEQ ID NO: 38769 - RNA, 21 nt, Artificial Sequence
  RPE65 RNA guide
ccaaauucuaaauuccugaac

SEQ ID NO: 38770 - RNA, 21 nt, Artificial Sequence
  RPE65 RNA guide
ccaagcuccaaauggacugca

SEQ ID NO: 38771 - RNA, 21 nt, Artificial Sequence
  RPE65 RNA guide
ccaauugcaggaaagcaucau

SEQ ID NO: 38772 - RNA, 21 nt, Artificial Sequence
  RPE65 RNA guide
ccacauuaaguuucaaauccu

SEQ ID NO: 38773 - RNA, 21 nt, Artificial Sequence
  RPE65 RNA guide
ccagguucaugcuagcuuaua

SEQ ID NO: 38774 - RNA, 21 nt, Artificial Sequence
  RPE65 RNA guide
ccaguauuuaccagguucaug

SEQ ID NO: 38775 - RNA, 21 nt, Artificial Sequence
  RPE65 RNA guide
ccauauucagaauuuaugcua

SEQ ID NO: 38776 - RNA, 21 nt, Artificial Sequence
  RPE65 RNA guide
ccauguuacccuacucauuga

SEQ ID NO: 38777 - RNA, 21 nt, Artificial Sequence
  RPE65 RNA guide
ccauuccaagcuccaaaugga

SEQ ID NO: 38778 - RNA, 21 nt, Artificial Sequence
  RPE65 RNA guide
ccauuuggagcuuggaauggu

SEQ ID NO: 38779 - RNA, 21 nt, Artificial Sequence
  RPE65 RNA guide
cccaguauuuaccagguucau

SEQ ID NO: 38780 - RNA, 21 nt, Artificial Sequence
  RPE65 RNA guide
cccauauaaaaugccuaacau

SEQ ID NO: 38781 - RNA, 21 nt, Artificial Sequence
  RPE65 RNA guide
cccuacucauugaucuauccc

SEQ ID NO: 38782 - RNA, 21 nt, Artificial Sequence
  RPE65 RNA guide
cccugccuuucauagcuuuua

SEQ ID NO: 38783 - RNA, 21 nt, Artificial Sequence
  RPE65 RNA guide
cccuugcaucuagcauaaauu

SEQ ID NO: 38784 - RNA, 21 nt, Artificial Sequence
  RPE65 RNA guide
ccuacucauugaucuaucccu

SEQ ID NO: 38785 - RNA, 21 nt, Artificial Sequence
  RPE65 RNA guide
ccuagcauugucaacaaugac

SEQ ID NO: 38786 - RNA, 21 nt, Artificial Sequence
  RPE65 RNA guide
ccuaugucaaauagcuaguca

SEQ ID NO: 38787 - RNA, 21 nt, Artificial Sequence
  RPE65 RNA guide
ccucaucaaguuagaaucaua

SEQ ID NO: 38788 - RNA, 21 nt, Artificial Sequence
  RPE65 RNA guide
ccucugucuaugaugcuuucc

SEQ ID NO: 38789 - RNA, 21 nt, Artificial Sequence
  RPE65 RNA guide
ccugaacaucaccuagcacug

SEQ ID NO: 38790 - RNA, 21 nt, Artificial Sequence
  RPE65 RNA guide
ccugcaauugguguaauuugg

SEQ ID NO: 38791 - RNA, 21 nt, Artificial Sequence
  RPE65 RNA guide
ccugccuuucauagcuuuuau

SEQ ID NO: 38792 - RNA, 21 nt, Artificial Sequence
  RPE65 RNA guide
ccuugcaucuagcauaaauuc

SEQ ID NO: 38793 - RNA, 21 nt, Artificial Sequence
  RPE65 RNA guide
ccuuucauagcuuuuauaagc

SEQ ID NO: 38794 - RNA, 21 nt, Artificial Sequence
  RPE65 RNA guide
cgaauguaugauucuaacuug

SEQ ID NO: 38795 - RNA, 21 nt, Artificial Sequence
  RPE65 RNA guide
cgcagcaugaauaauuuaugu

SEQ ID NO: 38796 - RNA, 21 nt, Artificial Sequence
  RPE65 RNA guide
cuaaauuccugaacaucaccu

SEQ ID NO: 38797 - RNA, 21 nt, Artificial Sequence
  RPE65 RNA guide
cuaacuugaugaggacacaca

SEQ ID NO: 38798 - RNA, 21 nt, Artificial Sequence
  RPE65 RNA guide
cuacucauugaucuaucccuu

SEQ ID NO: 38799 - RNA, 21 nt, Artificial Sequence
  RPE65 RNA guide
cuagaugcaagggauagauca

SEQ ID NO: 38800 - RNA, 21 nt, Artificial Sequence
  RPE65 RNA guide
cuagcaugaaccugguaaaua

SEQ ID NO: 38801 - RNA, 21 nt, Artificial Sequence
  RPE65 RNA guide
cuagcauugucaacaaugacu

SEQ ID NO: 38802 - RNA, 21 nt, Artificial Sequence
  RPE65 RNA guide
cuagcuauuugacauaggaca

SEQ ID NO: 38803 - RNA, 21 nt, Artificial Sequence
  RPE65 RNA guide
cuagcuuauaaaagcuaugaa

SEQ ID NO: 38804 - RNA, 21 nt, Artificial Sequence
  RPE65 RNA guide
cuaggauuugaaacuuaaugu

SEQ ID NO: 38805 - RNA, 21 nt, Artificial Sequence
  RPE65 RNA guide
cuaggugauguucaggaauuu

SEQ ID NO: 38806 - RNA, 21 nt, Artificial Sequence
  RPE65 RNA guide
cuagucauuguugacaaugcu

SEQ ID NO: 38807 - RNA, 21 nt, Artificial Sequence
  RPE65 RNA guide
cuaucccuugcaucuagcaua

SEQ ID NO: 38808 - RNA, 21 nt, Artificial Sequence
  RPE65 RNA guide
cuaugaaaggcagggaccaug

SEQ ID NO: 38809 - RNA, 21 nt, Artificial Sequence
  RPE65 RNA guide
cuaugaugcuuuccugcaauu

SEQ ID NO: 38810 - RNA, 21 nt, Artificial Sequence
  RPE65 RNA guide
cuaugucaaauagcuagucau

SEQ ID NO: 38811 - RNA, 21 nt, Artificial Sequence
  RPE65 RNA guide
cuauuugacauaggacaaaca

SEQ ID NO: 38812 - RNA, 21 nt, Artificial Sequence
  RPE65 RNA guide
cucaucaaguuagaaucauac

SEQ ID NO: 38813 - RNA, 21 nt, Artificial Sequence
  RPE65 RNA guide
cucauguucuuuucaccaaau

SEQ ID NO: 38814 - RNA, 21 nt, Artificial Sequence
  RPE65 RNA guide
cucauugaucuaucccuugca

SEQ ID NO: 38815 - RNA, 21 nt, Artificial Sequence
  RPE65 RNA guide
cuccaaauggacugcacugau

SEQ ID NO: 38816 - RNA, 21 nt, Artificial Sequence
  RPE65 RNA guide
cuccaauccauguaaguguuu

SEQ ID NO: 38817 - RNA, 21 nt, Artificial Sequence
  RPE65 RNA guide
cucucauguucuuuucaccaa

SEQ ID NO: 38818 - RNA, 21 nt, Artificial Sequence
  RPE65 RNA guide
cucuccaauccauguaagugu

SEQ ID NO: 38819 - RNA, 21 nt, Artificial Sequence
  RPE65 RNA guide
cucugucuaugaugcuuuccu

SEQ ID NO: 38820 - RNA, 21 nt, Artificial Sequence
  RPE65 RNA guide
cugaacaucaccuagcacugu

SEQ ID NO: 38821 - RNA, 21 nt, Artificial Sequence
  RPE65 RNA guide
cugaauauggaaagcacuuga

SEQ ID NO: 38822 - RNA, 21 nt, Artificial Sequence
  RPE65 RNA guide
cugauugccucugucuaugau

SEQ ID NO: 38823 - RNA, 21 nt, Artificial Sequence
  RPE65 RNA guide
cugcaauugguguaauuuggu

SEQ ID NO: 38824 - RNA, 21 nt, Artificial Sequence
  RPE65 RNA guide
cugcacugauugccucugucu

SEQ ID NO: 38825 - RNA, 21 nt, Artificial Sequence
  RPE65 RNA guide
cugccuuucauagcuuuuaua

SEQ ID NO: 38826 - RNA, 21 nt, Artificial Sequence
  RPE65 RNA guide
cugcgaauguaugauucuaac

SEQ ID NO: 38827 - RNA, 21 nt, Artificial Sequence
  RPE65 RNA guide
cugucuaugaugcuuuccugc

SEQ ID NO: 38828 - RNA, 21 nt, Artificial Sequence
  RPE65 RNA guide
cuguguguccucaucaaguua

SEQ ID NO: 38829 - RNA, 21 nt, Artificial Sequence
  RPE65 RNA guide
cuuaauguggcucucauguuc

SEQ ID NO: 38830 - RNA, 21 nt, Artificial Sequence
  RPE65 RNA guide
cuuacauggauuggagagaac

SEQ ID NO: 38831 - RNA, 21 nt, Artificial Sequence
  RPE65 RNA guide
cuuauaaaagcuaugaaaggc

SEQ ID NO: 38832 - RNA, 21 nt, Artificial Sequence
  RPE65 RNA guide
cuuaucaagugcuuuccauau

SEQ ID NO: 38833 - RNA, 21 nt, Artificial Sequence
  RPE65 RNA guide
cuugaugaggacacacagaau

SEQ ID NO: 38834 - RNA, 21 nt, Artificial Sequence
  RPE65 RNA guide
cuugcaucuagcauaaauucu

SEQ ID NO: 38835 - RNA, 21 nt, Artificial Sequence
  RPE65 RNA guide
cuuggaauggucauucugugu

SEQ ID NO: 38836 - RNA, 21 nt, Artificial Sequence
  RPE65 RNA guide
cuuucauagcuuuuauaagcu

SEQ ID NO: 38837 - RNA, 21 nt, Artificial Sequence
  RPE65 RNA guide
cuuuccugcaauugguguaau

SEQ ID NO: 38838 - RNA, 21 nt, Artificial Sequence
  RPE65 RNA guide
cuuuuauaagcuagcaugaac

SEQ ID NO: 38839 - RNA, 21 nt, Artificial Sequence
  RPE65 RNA guide
cuuuucaccaaauuacaccaa

SEQ ID NO: 38840 - RNA, 21 nt, Artificial Sequence
  RPE65 RNA guide
gaaaagaacaugagagccaca

SEQ ID NO: 38841 - RNA, 21 nt, Artificial Sequence
  RPE65 RNA guide
gaaacaauguuuguccuaugu

SEQ ID NO: 38842 - RNA, 21 nt, Artificial Sequence
  RPE65 RNA guide
gaaacuuaauguggcucucau

SEQ ID NO: 38843 - RNA, 21 nt, Artificial Sequence
  RPE65 RNA guide
gaaagcacuugauaaguauuu

SEQ ID NO: 38844 - RNA, 21 nt, Artificial Sequence
  RPE65 RNA guide
gaaagcaucauagacagaggc

SEQ ID NO: 38845 - RNA, 21 nt, Artificial Sequence
  RPE65 RNA guide
gaaaggcagggaccauguuac

SEQ ID NO: 38846 - RNA, 21 nt, Artificial Sequence
  RPE65 RNA guide
gaacaucaccuagcacugugu

SEQ ID NO: 38847 - RNA, 21 nt, Artificial Sequence
  RPE65 RNA guide
gaacaugagagccacauuaag

SEQ ID NO: 38848 - RNA, 21 nt, Artificial Sequence
  RPE65 RNA guide
gaacccauauaaaaugccuaa

SEQ ID NO: 38849 - RNA, 21 nt, Artificial Sequence
  RPE65 RNA guide
gaaccugguaaauacugggug

SEQ ID NO: 38850 - RNA, 21 nt, Artificial Sequence
  RPE65 RNA guide
gaagaaacaauguuuguccua

SEQ ID NO: 38851 - RNA, 21 nt, Artificial Sequence
  RPE65 RNA guide
gaauauggaaagcacuugaua

SEQ ID NO: 38852 - RNA, 21 nt, Artificial Sequence
  RPE65 RNA guide
gaauauguuaggcauuuuaua

SEQ ID NO: 38853 - RNA, 21 nt, Artificial Sequence
  RPE65 RNA guide
gaaucauacauucgcagcaug

SEQ ID NO: 38854 - RNA, 21 nt, Artificial Sequence
  RPE65 RNA guide
gaaugaaugaaugaauauguu

SEQ ID NO: 38855 - RNA, 21 nt, Artificial Sequence
  RPE65 RNA guide
gaaugaccauuccaagcucca

SEQ ID NO: 38856 - RNA, 21 nt, Artificial Sequence
  RPE65 RNA guide
gaauggucauucugugugucc

SEQ ID NO: 38857 - RNA, 21 nt, Artificial Sequence
  RPE65 RNA guide
gaauguaugauucuaacuuga

SEQ ID NO: 38858 - RNA, 21 nt, Artificial Sequence
  RPE65 RNA guide
gaauuuaugcuagaugcaagg

SEQ ID NO: 38859 - RNA, 21 nt, Artificial Sequence
  RPE65 RNA guide
gacaaacauuguuucuucauc

SEQ ID NO: 38860 - RNA, 21 nt, Artificial Sequence
  RPE65 RNA guide
gacaaugcuaggauuugaaac

SEQ ID NO: 38861 - RNA, 21 nt, Artificial Sequence
  RPE65 RNA guide
gacacaaauacuuaucaagug

SEQ ID NO: 38862 - RNA, 21 nt, Artificial Sequence
  RPE65 RNA guide
gacacacagaaugaccauucc

SEQ ID NO: 38863 - RNA, 21 nt, Artificial Sequence
  RPE65 RNA guide
gacacagugcuaggugauguu

SEQ ID NO: 38864 - RNA, 21 nt, Artificial Sequence
  RPE65 RNA guide
gacagaggcaaucagugcagu

SEQ ID NO: 38865 - RNA, 21 nt, Artificial Sequence
  RPE65 RNA guide
gacauaggacaaacauuguuu

SEQ ID NO: 38866 - RNA, 21 nt, Artificial Sequence
  RPE65 RNA guide
gaccauguuacccuacucauu

SEQ ID NO: 38867 - RNA, 21 nt, Artificial Sequence
  RPE65 RNA guide
gaccauuccaagcuccaaaug

SEQ ID NO: 38868 - RNA, 21 nt, Artificial Sequence
  RPE65 RNA guide
gacuagcuauuugacauagga

SEQ ID NO: 38869 - RNA, 21 nt, Artificial Sequence
  RPE65 RNA guide
gacugcacugauugccucugu

SEQ ID NO: 38870 - RNA, 21 nt, Artificial Sequence
  RPE65 RNA guide
gagaacccauauaaaaugccu

SEQ ID NO: 38871 - RNA, 21 nt, Artificial Sequence
  RPE65 RNA guide
gagagaacccauauaaaaugc

SEQ ID NO: 38872 - RNA, 21 nt, Artificial Sequence
  RPE65 RNA guide
gagagccacauuaaguuucaa

SEQ ID NO: 38873 - RNA, 21 nt, Artificial Sequence
  RPE65 RNA guide
gagaugaagaaacaauguuug

SEQ ID NO: 38874 - RNA, 21 nt, Artificial Sequence
  RPE65 RNA guide
gagcacccaguauuuaccagg

SEQ ID NO: 38875 - RNA, 21 nt, Artificial Sequence
  RPE65 RNA guide
gagccacauuaaguuucaaau

SEQ ID NO: 38876 - RNA, 21 nt, Artificial Sequence
  RPE65 RNA guide
gagcuuggaauggucauucug

SEQ ID NO: 38877 - RNA, 21 nt, Artificial Sequence
  RPE65 RNA guide
gaggacacacagaaugaccau

SEQ ID NO: 38878 - RNA, 21 nt, Artificial Sequence
  RPE65 RNA guide
gaggcaaucagugcaguccau

SEQ ID NO: 38879 - RNA, 21 nt, Artificial Sequence
  RPE65 RNA guide
gaguaggguaacauggucccu

SEQ ID NO: 38880 - RNA, 21 nt, Artificial Sequence
  RPE65 RNA guide
gauagaucaaugaguagggua

SEQ ID NO: 38881 - RNA, 21 nt, Artificial Sequence
  RPE65 RNA guide
gaucaaugaguaggguaacau

SEQ ID NO: 38882 - RNA, 21 nt, Artificial Sequence
  RPE65 RNA guide
gaucuaucccuugcaucuagc

SEQ ID NO: 38883 - RNA, 21 nt, Artificial Sequence
  RPE65 RNA guide
gaugaagaaacaauguuuguc

SEQ ID NO: 38884 - RNA, 21 nt, Artificial Sequence
  RPE65 RNA guide
gaugaggacacacagaaugac

SEQ ID NO: 38885 - RNA, 21 nt, Artificial Sequence
  RPE65 RNA guide
gaugcaagggauagaucaaug

SEQ ID NO: 38886 - RNA, 21 nt, Artificial Sequence
  RPE65 RNA guide
gaugcuuuccugcaauuggug

SEQ ID NO: 38887 - RNA, 21 nt, Artificial Sequence
  RPE65 RNA guide
gauguucaggaauuuagaauu

SEQ ID NO: 38888 - RNA, 21 nt, Artificial Sequence
  RPE65 RNA guide
gauucuaacuugaugaggaca

SEQ ID NO: 38889 - RNA, 21 nt, Artificial Sequence
  RPE65 RNA guide
gauugccucugucuaugaugc

SEQ ID NO: 38890 - RNA, 21 nt, Artificial Sequence
  RPE65 RNA guide
gauuggagagaacccauauaa

SEQ ID NO: 38891 - RNA, 21 nt, Artificial Sequence
  RPE65 RNA guide
gauuugaaacuuaauguggcu

SEQ ID NO: 38892 - RNA, 21 nt, Artificial Sequence
  RPE65 RNA guide
gcaagggauagaucaaugagu

SEQ ID NO: 38893 - RNA, 21 nt, Artificial Sequence
  RPE65 RNA guide
gcaaucagugcaguccauuug

SEQ ID NO: 38894 - RNA, 21 nt, Artificial Sequence
  RPE65 RNA guide
gcaauugguguaauuugguga

SEQ ID NO: 38895 - RNA, 21 nt, Artificial Sequence
  RPE65 RNA guide
gcacccaguauuuaccagguu

SEQ ID NO: 38896 - RNA, 21 nt, Artificial Sequence
  RPE65 RNA guide
gcacugauugccucugucuau

SEQ ID NO: 38897 - RNA, 21 nt, Artificial Sequence
  RPE65 RNA guide
gcacuugauaaguauuugugu

SEQ ID NO: 38898 - RNA, 21 nt, Artificial Sequence
  RPE65 RNA guide
gcaggaaagcaucauagacag

SEQ ID NO: 38899 - RNA, 21 nt, Artificial Sequence
  RPE65 RNA guide
gcagggaccauguuacccuac

SEQ ID NO: 38900 - RNA, 21 nt, Artificial Sequence
  RPE65 RNA guide
gcaguccauuuggagcuugga

SEQ ID NO: 38901 - RNA, 21 nt, Artificial Sequence
  RPE65 RNA guide
gcauaaauucugaauauggaa

SEQ ID NO: 38902 - RNA, 21 nt, Artificial Sequence
  RPE65 RNA guide
gcaucauagacagaggcaauc

SEQ ID NO: 38903 - RNA, 21 nt, Artificial Sequence
  RPE65 RNA guide
gcaucuagcauaaauucugaa

SEQ ID NO: 38904 - RNA, 21 nt, Artificial Sequence
  RPE65 RNA guide
gcaugaaccugguaaauacug

SEQ ID NO: 38905 - RNA, 21 nt, Artificial Sequence
  RPE65 RNA guide
gcauugucaacaaugacuagc

SEQ ID NO: 38906 - RNA, 21 nt, Artificial Sequence
  RPE65 RNA guide
gcauuuuauauggguucucuc

SEQ ID NO: 38907 - RNA, 21 nt, Artificial Sequence
  RPE65 RNA guide
gccacauuaaguuucaaaucc

SEQ ID NO: 38908 - RNA, 21 nt, Artificial Sequence
  RPE65 RNA guide
gccuaacauauucauucauuc

SEQ ID NO: 38909 - RNA, 21 nt, Artificial Sequence
  RPE65 RNA guide
gccucugucuaugaugcuuuc

SEQ ID NO: 38910 - RNA, 21 nt, Artificial Sequence
  RPE65 RNA guide
gccuuucauagcuuuuauaag

SEQ ID NO: 38911 - RNA, 21 nt, Artificial Sequence
  RPE65 RNA guide
gcgaauguaugauucuaacuu

SEQ ID NO: 38912 - RNA, 21 nt, Artificial Sequence
  RPE65 RNA guide
gcuagaugcaagggauagauc

SEQ ID NO: 38913 - RNA, 21 nt, Artificial Sequence
  RPE65 RNA guide
gcuagcaugaaccugguaaau

SEQ ID NO: 38914 - RNA, 21 nt, Artificial Sequence
  RPE65 RNA guide
gcuagcuuauaaaagcuauga

SEQ ID NO: 38915 - RNA, 21 nt, Artificial Sequence
  RPE65 RNA guide
gcuaggauuugaaacuuaaug

SEQ ID NO: 38916 - RNA, 21 nt, Artificial Sequence
  RPE65 RNA guide
gcuaggugauguucaggaauu

SEQ ID NO: 38917 - RNA, 21 nt, Artificial Sequence
  RPE65 RNA guide
gcuagucauuguugacaaugc

SEQ ID NO: 38918 - RNA, 21 nt, Artificial Sequence
  RPE65 RNA guide
gcuaugaaaggcagggaccau

SEQ ID NO: 38919 - RNA, 21 nt, Artificial Sequence
  RPE65 RNA guide
gcuauuugacauaggacaaac

SEQ ID NO: 38920 - RNA, 21 nt, Artificial Sequence
  RPE65 RNA guide
gcuccaaauggacugcacuga

SEQ ID NO: 38921 - RNA, 21 nt, Artificial Sequence
  RPE65 RNA guide
gcucucauguucuuuucacca

SEQ ID NO: 38922 - RNA, 21 nt, Artificial Sequence
  RPE65 RNA guide
gcugcgaauguaugauucuaa

SEQ ID NO: 38923 - RNA, 21 nt, Artificial Sequence
  RPE65 RNA guide
gcuuauaaaagcuaugaaagg

SEQ ID NO: 38924 - RNA, 21 nt, Artificial Sequence
  RPE65 RNA guide
gcuuggaauggucauucugug

SEQ ID NO: 38925 - RNA, 21 nt, Artificial Sequence
  RPE65 RNA guide
gcuuuccauauucagaauuua

SEQ ID NO: 38926 - RNA, 21 nt, Artificial Sequence
  RPE65 RNA guide
gcuuuccugcaauugguguaa

SEQ ID NO: 38927 - RNA, 21 nt, Artificial Sequence
  RPE65 RNA guide
gcuuuuauaagcuagcaugaa

SEQ ID NO: 38928 - RNA, 21 nt, Artificial Sequence
  RPE65 RNA guide
ggaaagcacuugauaaguauu

SEQ ID NO: 38929 - RNA, 21 nt, Artificial Sequence
  RPE65 RNA guide
ggaaagcaucauagacagagg

SEQ ID NO: 38930 - RNA, 21 nt, Artificial Sequence
  RPE65 RNA guide
ggaauggucauucuguguguc

SEQ ID NO: 38931 - RNA, 21 nt, Artificial Sequence
  RPE65 RNA guide
ggacaaacauuguuucuucau

SEQ ID NO: 38932 - RNA, 21 nt, Artificial Sequence
  RPE65 RNA guide
ggacacacagaaugaccauuc

SEQ ID NO: 38933 - RNA, 21 nt, Artificial Sequence
  RPE65 RNA guide
ggacacagugcuaggugaugu

SEQ ID NO: 38934 - RNA, 21 nt, Artificial Sequence
  RPE65 RNA guide
ggaccauguuacccuacucau

SEQ ID NO: 38935 - RNA, 21 nt, Artificial Sequence
  RPE65 RNA guide
ggacugcacugauugccucug

SEQ ID NO: 38936 - RNA, 21 nt, Artificial Sequence
  RPE65 RNA guide
ggagagaacccauauaaaaug

SEQ ID NO: 38937 - RNA, 21 nt, Artificial Sequence
  RPE65 RNA guide
ggagcuuggaauggucauucu

SEQ ID NO: 38938 - RNA, 21 nt, Artificial Sequence
  RPE65 RNA guide
ggauagaucaaugaguagggu

SEQ ID NO: 38939 - RNA, 21 nt, Artificial Sequence
  RPE65 RNA guide
ggauuggagagaacccauaua

SEQ ID NO: 38940 - RNA, 21 nt, Artificial Sequence
  RPE65 RNA guide
ggauuugaaacuuaauguggc

SEQ ID NO: 38941 - RNA, 21 nt, Artificial Sequence
  RPE65 RNA guide
ggcaaucagugcaguccauuu

SEQ ID NO: 38942 - RNA, 21 nt, Artificial Sequence
  RPE65 RNA guide
ggcagggaccauguuacccua

SEQ ID NO: 38943 - RNA, 21 nt, Artificial Sequence
  RPE65 RNA guide
ggcauuuuauauggguucucu

SEQ ID NO: 38944 - RNA, 21 nt, Artificial Sequence
  RPE65 RNA guide
ggcucucauguucuuuucacc

SEQ ID NO: 38945 - RNA, 21 nt, Artificial Sequence
  RPE65 RNA guide
gggacacagugcuaggugaug

SEQ ID NO: 38946 - RNA, 21 nt, Artificial Sequence
  RPE65 RNA guide
gggaccauguuacccuacuca

SEQ ID NO: 38947 - RNA, 21 nt, Artificial Sequence
  RPE65 RNA guide
gggauagaucaaugaguaggg

SEQ ID NO: 38948 - RNA, 21 nt, Artificial Sequence
  RPE65 RNA guide
ggguaacauggucccugccuu

SEQ ID NO: 38949 - RNA, 21 nt, Artificial Sequence
  RPE65 RNA guide
ggguucucuccaauccaugua

SEQ ID NO: 38950 - RNA, 21 nt, Artificial Sequence
  RPE65 RNA guide
gguaacauggucccugccuuu

SEQ ID NO: 38951 - RNA, 21 nt, Artificial Sequence
  RPE65 RNA guide
ggucauucuguguguccucau

SEQ ID NO: 38952 - RNA, 21 nt, Artificial Sequence
  RPE65 RNA guide
ggucccugccuuucauagcuu

SEQ ID NO: 38953 - RNA, 21 nt, Artificial Sequence
  RPE65 RNA guide
ggugaaaagaacaugagagcc

SEQ ID NO: 38954 - RNA, 21 nt, Artificial Sequence
  RPE65 RNA guide
ggugauguucaggaauuuaga

SEQ ID NO: 38955 - RNA, 21 nt, Artificial Sequence
  RPE65 RNA guide
gguguaauuuggugaaaagaa

SEQ ID NO: 38956 - RNA, 21 nt, Artificial Sequence
  RPE65 RNA guide
gguucaugcuagcuuauaaaa

SEQ ID NO: 38957 - RNA, 21 nt, Artificial Sequence
  RPE65 RNA guide
gguucucuccaauccauguaa

SEQ ID NO: 38958 - RNA, 21 nt, Artificial Sequence
  RPE65 RNA guide
guaacauggucccugccuuuc

SEQ ID NO: 38959 - RNA, 21 nt, Artificial Sequence
  RPE65 RNA guide
guaauuuggugaaaagaacau

SEQ ID NO: 38960 - RNA, 21 nt, Artificial Sequence
  RPE65 RNA guide
guaggguaacauggucccugc

SEQ ID NO: 38961 - RNA, 21 nt, Artificial Sequence
  RPE65 RNA guide
guaugauucuaacuugaugag

SEQ ID NO: 38962 - RNA, 21 nt, Artificial Sequence
  RPE65 RNA guide
guauuuaccagguucaugcua

SEQ ID NO: 38963 - RNA, 21 nt, Artificial Sequence
  RPE65 RNA guide
gucaaauagcuagucauuguu

SEQ ID NO: 38964 - RNA, 21 nt, Artificial Sequence
  RPE65 RNA guide
gucaacaaugacuagcuauuu

SEQ ID NO: 38965 - RNA, 21 nt, Artificial Sequence
  RPE65 RNA guide
gucauucuguguguccucauc

SEQ ID NO: 38966 - RNA, 21 nt, Artificial Sequence
  RPE65 RNA guide
gucauuguugacaaugcuagg

SEQ ID NO: 38967 - RNA, 21 nt, Artificial Sequence
  RPE65 RNA guide
guccauuuggagcuuggaaug

SEQ ID NO: 38968 - RNA, 21 nt, Artificial Sequence
  RPE65 RNA guide
gucccugccuuucauagcuuu

SEQ ID NO: 38969 - RNA, 21 nt, Artificial Sequence
  RPE65 RNA guide
guccuaugucaaauagcuagu

SEQ ID NO: 38970 - RNA, 21 nt, Artificial Sequence
  RPE65 RNA guide
guccucaucaaguuagaauca

SEQ ID NO: 38971 - RNA, 21 nt, Artificial Sequence
  RPE65 RNA guide
gucuaugaugcuuuccugcaa

SEQ ID NO: 38972 - RNA, 21 nt, Artificial Sequence
  RPE65 RNA guide
gugaaaagaacaugagagcca

SEQ ID NO: 38973 - RNA, 21 nt, Artificial Sequence
  RPE65 RNA guide
gugauguucaggaauuuagaa

SEQ ID NO: 38974 - RNA, 21 nt, Artificial Sequence
  RPE65 RNA guide
gugcaguccauuuggagcuug

SEQ ID NO: 38975 - RNA, 21 nt, Artificial Sequence
  RPE65 RNA guide
gugcuaggugauguucaggaa

SEQ ID NO: 38976 - RNA, 21 nt, Artificial Sequence
  RPE65 RNA guide
gugcuuuccauauucagaauu

SEQ ID NO: 38977 - RNA, 21 nt, Artificial Sequence
  RPE65 RNA guide
guggcucucauguucuuuuca

SEQ ID NO: 38978 - RNA, 21 nt, Artificial Sequence
  RPE65 RNA guide
gugggacacagugcuagguga

SEQ ID NO: 38979 - RNA, 21 nt, Artificial Sequence
  RPE65 RNA guide
guguaauuuggugaaaagaac

SEQ ID NO: 38980 - RNA, 21 nt, Artificial Sequence
  RPE65 RNA guide
guguccucaucaaguuagaau

SEQ ID NO: 38981 - RNA, 21 nt, Artificial Sequence
  RPE65 RNA guide
guguguccucaucaaguuaga

SEQ ID NO: 38982 - RNA, 21 nt, Artificial Sequence
  RPE65 RNA guide
guuacccuacucauugaucua

SEQ ID NO: 38983 - RNA, 21 nt, Artificial Sequence
  RPE65 RNA guide
guuagaaucauacauucgcag

SEQ ID NO: 38984 - RNA, 21 nt, Artificial Sequence
  RPE65 RNA guide
guuaggcauuuuauauggguu

SEQ ID NO: 38985 - RNA, 21 nt, Artificial Sequence
  RPE65 RNA guide
guucaggaauuuagaauuugg

SEQ ID NO: 38986 - RNA, 21 nt, Artificial Sequence
  RPE65 RNA guide
guucaugcuagcuuauaaaag

SEQ ID NO: 38987 - RNA, 21 nt, Artificial Sequence
  RPE65 RNA guide
guuccaaauucuaaauuccug

SEQ ID NO: 38988 - RNA, 21 nt, Artificial Sequence
  RPE65 RNA guide
guucucuccaauccauguaag

SEQ ID NO: 38989 - RNA, 21 nt, Artificial Sequence
  RPE65 RNA guide
guucuuuucaccaaauuacac

SEQ ID NO: 38990 - RNA, 21 nt, Artificial Sequence
  RPE65 RNA guide
guugacaaugcuaggauuuga

SEQ ID NO: 38991 - RNA, 21 nt, Artificial Sequence
  RPE65 RNA guide
guuucaaauccuagcauuguc

SEQ ID NO: 38992 - RNA, 21 nt, Artificial Sequence
  RPE65 RNA guide
guuuguccuaugucaaauagc

SEQ ID NO: 38993 - RNA, 21 nt, Artificial Sequence
  RPE65 RNA guide
uaaaagcuaugaaaggcaggg

SEQ ID NO: 38994 - RNA, 21 nt, Artificial Sequence
  RPE65 RNA guide
uaaacacuuacauggauugga

SEQ ID NO: 38995 - RNA, 21 nt, Artificial Sequence
  RPE65 RNA guide
uaaauuccugaacaucaccua

SEQ ID NO: 38996 - RNA, 21 nt, Artificial Sequence
  RPE65 RNA guide
uaacauggucccugccuuuca

SEQ ID NO: 38997 - RNA, 21 nt, Artificial Sequence
  RPE65 RNA guide
uaacuugaugaggacacacag

SEQ ID NO: 38998 - RNA, 21 nt, Artificial Sequence
  RPE65 RNA guide
uaagcuagcaugaaccuggua

SEQ ID NO: 38999 - RNA, 21 nt, Artificial Sequence
  RPE65 RNA guide
uaaguuucaaauccuagcauu

SEQ ID NO: 39000 - RNA, 21 nt, Artificial Sequence
  RPE65 RNA guide
uaauguggcucucauguucuu

SEQ ID NO: 39001 - RNA, 21 nt, Artificial Sequence
  RPE65 RNA guide
uaauuuggugaaaagaacaug

SEQ ID NO: 39002 - RNA, 21 nt, Artificial Sequence
  RPE65 RNA guide
uacaccaauugcaggaaagca

SEQ ID NO: 39003 - RNA, 21 nt, Artificial Sequence
  RPE65 RNA guide
uacauggauuggagagaaccc

SEQ ID NO: 39004 - RNA, 21 nt, Artificial Sequence
  RPE65 RNA guide
uaccagguucaugcuagcuua

SEQ ID NO: 39005 - RNA, 21 nt, Artificial Sequence
  RPE65 RNA guide
uacccuacucauugaucuauc

SEQ ID NO: 39006 - RNA, 21 nt, Artificial Sequence
  RPE65 RNA guide
uacucauugaucuaucccuug

SEQ ID NO: 39007 - RNA, 21 nt, Artificial Sequence
  RPE65 RNA guide
uacuuaucaagugcuuuccau

SEQ ID NO: 39008 - RNA, 21 nt, Artificial Sequence
  RPE65 RNA guide
uagaaucauacauucgcagca

SEQ ID NO: 39009 - RNA, 21 nt, Artificial Sequence
  RPE65 RNA guide
uagacagaggcaaucagugca

SEQ ID NO: 39010 - RNA, 21 nt, Artificial Sequence
  RPE65 RNA guide
uagagaugaagaaacaauguu

SEQ ID NO: 39011 - RNA, 21 nt, Artificial Sequence
  RPE65 RNA guide
uagaucaaugaguaggguaac

SEQ ID NO: 39012 - RNA, 21 nt, Artificial Sequence
  RPE65 RNA guide
uagaugcaagggauagaucaa

SEQ ID NO: 39013 - RNA, 21 nt, Artificial Sequence
  RPE65 RNA guide
uagcaugaaccugguaaauac

SEQ ID NO: 39014 - RNA, 21 nt, Artificial Sequence
  RPE65 RNA guide
uagcauugucaacaaugacua

SEQ ID NO: 39015 - RNA, 21 nt, Artificial Sequence
  RPE65 RNA guide
uagcuagucauuguugacaau

SEQ ID NO: 39016 - RNA, 21 nt, Artificial Sequence
  RPE65 RNA guide
uagcuauuugacauaggacaa

SEQ ID NO: 39017 - RNA, 21 nt, Artificial Sequence
  RPE65 RNA guide
uagcuuauaaaagcuaugaaa

SEQ ID NO: 39018 - RNA, 21 nt, Artificial Sequence
  RPE65 RNA guide
uagcuuuuauaagcuagcaug

SEQ ID NO: 39019 - RNA, 21 nt, Artificial Sequence
  RPE65 RNA guide
uaggacaaacauuguuucuuc

SEQ ID NO: 39020 - RNA, 21 nt, Artificial Sequence
  RPE65 RNA guide
uaggauuugaaacuuaaugug

SEQ ID NO: 39021 - RNA, 21 nt, Artificial Sequence
  RPE65 RNA guide
uaggcauuuuauauggguucu

SEQ ID NO: 39022 - RNA, 21 nt, Artificial Sequence
  RPE65 RNA guide
uaggguaacauggucccugcc

SEQ ID NO: 39023 - RNA, 21 nt, Artificial Sequence
  RPE65 RNA guide
uaggugauguucaggaauuua

SEQ ID NO: 39024 - RNA, 21 nt, Artificial Sequence
  RPE65 RNA guide
uagucauuguugacaaugcua

SEQ ID NO: 39025 - RNA, 21 nt, Artificial Sequence
  RPE65 RNA guide
uauaaaagcuaugaaaggcag

SEQ ID NO: 39026 - RNA, 21 nt, Artificial Sequence
  RPE65 RNA guide
uauaagcuagcaugaaccugg

SEQ ID NO: 39027 - RNA, 21 nt, Artificial Sequence
  RPE65 RNA guide
uauauggguucucuccaaucc

SEQ ID NO: 39028 - RNA, 21 nt, Artificial Sequence
  RPE65 RNA guide
uaucaagugcuuuccauauuc

SEQ ID NO: 39029 - RNA, 21 nt, Artificial Sequence
  RPE65 RNA guide
uaucccuugcaucuagcauaa

SEQ ID NO: 39030 - RNA, 21 nt, Artificial Sequence
  RPE65 RNA guide
uaugaaaggcagggaccaugu

SEQ ID NO: 39031 - RNA, 21 nt, Artificial Sequence
  RPE65 RNA guide
uaugaugcuuuccugcaauug

SEQ ID NO: 39032 - RNA, 21 nt, Artificial Sequence
  RPE65 RNA guide
uaugauucuaacuugaugagg

SEQ ID NO: 39033 - RNA, 21 nt, Artificial Sequence
  RPE65 RNA guide
uaugcuagaugcaagggauag

SEQ ID NO: 39034 - RNA, 21 nt, Artificial Sequence
  RPE65 RNA guide
uauggguucucuccaauccau

SEQ ID NO: 39035 - RNA, 21 nt, Artificial Sequence
  RPE65 RNA guide
uaugucaaauagcuagucauu

SEQ ID NO: 39036 - RNA, 21 nt, Artificial Sequence
  RPE65 RNA guide
uauguuaggcauuuuauaugg

SEQ ID NO: 39037 - RNA, 21 nt, Artificial Sequence
  RPE65 RNA guide
uauucaugcugcgaauguaug

SEQ ID NO: 39038 - RNA, 21 nt, Artificial Sequence
  RPE65 RNA guide
uauuuaccagguucaugcuag

SEQ ID NO: 39039 - RNA, 21 nt, Artificial Sequence
  RPE65 RNA guide
ucaaauagcuagucauuguug

SEQ ID NO: 39040 - RNA, 21 nt, Artificial Sequence
  RPE65 RNA guide
ucaaauccuagcauugucaac

SEQ ID NO: 39041 - RNA, 21 nt, Artificial Sequence
  RPE65 RNA guide
ucaacaaugacuagcuauuug

SEQ ID NO: 39042 - RNA, 21 nt, Artificial Sequence
  RPE65 RNA guide
ucaacauaaauuauucaugcu

SEQ ID NO: 39043 - RNA, 21 nt, Artificial Sequence
  RPE65 RNA guide
ucaagugcuuuccauauucag

SEQ ID NO: 39044 - RNA, 21 nt, Artificial Sequence
  RPE65 RNA guide
ucaaguuagaaucauacauuc

SEQ ID NO: 39045 - RNA, 21 nt, Artificial Sequence
  RPE65 RNA guide
ucaaugaguaggguaacaugg

SEQ ID NO: 39046 - RNA, 21 nt, Artificial Sequence
  RPE65 RNA guide
ucaccaaauuacaccaauugc

SEQ ID NO: 39047 - RNA, 21 nt, Artificial Sequence
  RPE65 RNA guide
ucagaauuuaugcuagaugca

SEQ ID NO: 39048 - RNA, 21 nt, Artificial Sequence
  RPE65 RNA guide
ucagugcaguccauuuggagc

SEQ ID NO: 39049 - RNA, 21 nt, Artificial Sequence
  RPE65 RNA guide
ucauacauucgcagcaugaau

SEQ ID NO: 39050 - RNA, 21 nt, Artificial Sequence
  RPE65 RNA guide
ucauagacagaggcaaucagu

SEQ ID NO: 39051 - RNA, 21 nt, Artificial Sequence
  RPE65 RNA guide
ucauagcuuuuauaagcuagc

SEQ ID NO: 39052 - RNA, 21 nt, Artificial Sequence
  RPE65 RNA guide
ucaucaaguuagaaucauaca

SEQ ID NO: 39053 - RNA, 21 nt, Artificial Sequence
  RPE65 RNA guide
ucaugacacaaauacuuauca

SEQ ID NO: 39054 - RNA, 21 nt, Artificial Sequence
  RPE65 RNA guide
ucaugcuagcuuauaaaagcu

SEQ ID NO: 39055 - RNA, 21 nt, Artificial Sequence
  RPE65 RNA guide
ucaugcugcgaauguaugauu

SEQ ID NO: 39056 - RNA, 21 nt, Artificial Sequence
  RPE65 RNA guide
ucauguucuuuucaccaaauu

SEQ ID NO: 39057 - RNA, 21 nt, Artificial Sequence
  RPE65 RNA guide
ucauucuguguguccucauca

SEQ ID NO: 39058 - RNA, 21 nt, Artificial Sequence
  RPE65 RNA guide
ucauugaucuaucccuugcau

SEQ ID NO: 39059 - RNA, 21 nt, Artificial Sequence
  RPE65 RNA guide
ucauuguugacaaugcuagga

SEQ ID NO: 39060 - RNA, 21 nt, Artificial Sequence
  RPE65 RNA guide
uccaaauggacugcacugauu

SEQ ID NO: 39061 - RNA, 21 nt, Artificial Sequence
  RPE65 RNA guide
uccaaauucuaaauuccugaa

SEQ ID NO: 39062 - RNA, 21 nt, Artificial Sequence
  RPE65 RNA guide
uccaagcuccaaauggacugc

SEQ ID NO: 39063 - RNA, 21 nt, Artificial Sequence
  RPE65 RNA guide
uccauuuggagcuuggaaugg

SEQ ID NO: 39064 - RNA, 21 nt, Artificial Sequence
  RPE65 RNA guide
ucccugccuuucauagcuuuu

SEQ ID NO: 39065 - RNA, 21 nt, Artificial Sequence
  RPE65 RNA guide
ucccuugcaucuagcauaaau

SEQ ID NO: 39066 - RNA, 21 nt, Artificial Sequence
  RPE65 RNA guide
uccuagcauugucaacaauga

SEQ ID NO: 39067 - RNA, 21 nt, Artificial Sequence
  RPE65 RNA guide
uccuaugucaaauagcuaguc

SEQ ID NO: 39068 - RNA, 21 nt, Artificial Sequence
  RPE65 RNA guide
uccucaucaaguuagaaucau

SEQ ID NO: 39069 - RNA, 21 nt, Artificial Sequence
  RPE65 RNA guide
uccugaacaucaccuagcacu

SEQ ID NO: 39070 - RNA, 21 nt, Artificial Sequence
  RPE65 RNA guide
uccugcaauugguguaauuug

SEQ ID NO: 39071 - RNA, 21 nt, Artificial Sequence
  RPE65 RNA guide
ucgcagcaugaauaauuuaug

SEQ ID NO: 39072 - RNA, 21 nt, Artificial Sequence
  RPE65 RNA guide
ucuaaauuccugaacaucacc

SEQ ID NO: 39073 - RNA, 21 nt, Artificial Sequence
  RPE65 RNA guide
ucuaacuugaugaggacacac

SEQ ID NO: 39074 - RNA, 21 nt, Artificial Sequence
  RPE65 RNA guide
ucuaucccuugcaucuagcau

SEQ ID NO: 39075 - RNA, 21 nt, Artificial Sequence
  RPE65 RNA guide
ucuaugaugcuuuccugcaau

SEQ ID NO: 39076 - RNA, 21 nt, Artificial Sequence
  RPE65 RNA guide
ucucauguucuuuucaccaaa

SEQ ID NO: 39077 - RNA, 21 nt, Artificial Sequence
  RPE65 RNA guide
ucuccaauccauguaaguguu

SEQ ID NO: 39078 - RNA, 21 nt, Artificial Sequence
  RPE65 RNA guide
ucucuccaauccauguaagug

SEQ ID NO: 39079 - RNA, 21 nt, Artificial Sequence
  RPE65 RNA guide
ucugaauauggaaagcacuug

SEQ ID NO: 39080 - RNA, 21 nt, Artificial Sequence
  RPE65 RNA guide
ucugucuaugaugcuuuccug

SEQ ID NO: 39081 - RNA, 21 nt, Artificial Sequence
  RPE65 RNA guide
ucuguguguccucaucaaguu

SEQ ID NO: 39082 - RNA, 21 nt, Artificial Sequence
  RPE65 RNA guide
ucuuuucaccaaauuacacca

SEQ ID NO: 39083 - RNA, 21 nt, Artificial Sequence
  RPE65 RNA guide
ugaaaagaacaugagagccac

SEQ ID NO: 39084 - RNA, 21 nt, Artificial Sequence
  RPE65 RNA guide
ugaaacuuaauguggcucuca

SEQ ID NO: 39085 - RNA, 21 nt, Artificial Sequence
  RPE65 RNA guide
ugaaaggcagggaccauguua

SEQ ID NO: 39086 - RNA, 21 nt, Artificial Sequence
  RPE65 RNA guide
ugaacaucaccuagcacugug

SEQ ID NO: 39087 - RNA, 21 nt, Artificial Sequence
  RPE65 RNA guide
ugaaccugguaaauacugggu

SEQ ID NO: 39088 - RNA, 21 nt, Artificial Sequence
  RPE65 RNA guide
ugaagaaacaauguuuguccu

SEQ ID NO: 39089 - RNA, 21 nt, Artificial Sequence
  RPE65 RNA guide
ugaauauggaaagcacuugau

SEQ ID NO: 39090 - RNA, 21 nt, Artificial Sequence
  RPE65 RNA guide
ugacaaugcuaggauuugaaa

SEQ ID NO: 39091 - RNA, 21 nt, Artificial Sequence
  RPE65 RNA guide
ugacacaaauacuuaucaagu

SEQ ID NO: 39092 - RNA, 21 nt, Artificial Sequence
  RPE65 RNA guide
ugacauaggacaaacauuguu

SEQ ID NO: 39093 - RNA, 21 nt, Artificial Sequence
  RPE65 RNA guide
ugaccauuccaagcuccaaau

SEQ ID NO: 39094 - RNA, 21 nt, Artificial Sequence
  RPE65 RNA guide
ugacuagcuauuugacauagg

SEQ ID NO: 39095 - RNA, 21 nt, Artificial Sequence
  RPE65 RNA guide
ugagagccacauuaaguuuca

SEQ ID NO: 39096 - RNA, 21 nt, Artificial Sequence
  RPE65 RNA guide
ugagcacccaguauuuaccag

SEQ ID NO: 39097 - RNA, 21 nt, Artificial Sequence
  RPE65 RNA guide
ugaggacacacagaaugacca

SEQ ID NO: 39098 - RNA, 21 nt, Artificial Sequence
  RPE65 RNA guide
ugaguaggguaacaugguccc

SEQ ID NO: 39099 - RNA, 21 nt, Artificial Sequence
  RPE65 RNA guide
ugaucuaucccuugcaucuag

SEQ ID NO: 39100 - RNA, 21 nt, Artificial Sequence
  RPE65 RNA guide
ugaugaggacacacagaauga

SEQ ID NO: 39101 - RNA, 21 nt, Artificial Sequence
  RPE65 RNA guide
ugaugcuuuccugcaauuggu

SEQ ID NO: 39102 - RNA, 21 nt, Artificial Sequence
  RPE65 RNA guide
ugauguucaggaauuuagaau

SEQ ID NO: 39103 - RNA, 21 nt, Artificial Sequence
  RPE65 RNA guide
ugauucuaacuugaugaggac

SEQ ID NO: 39104 - RNA, 21 nt, Artificial Sequence
  RPE65 RNA guide
ugauugccucugucuaugaug

SEQ ID NO: 39105 - RNA, 21 nt, Artificial Sequence
  RPE65 RNA guide
ugcaagggauagaucaaugag

SEQ ID NO: 39106 - RNA, 21 nt, Artificial Sequence
  RPE65 RNA guide
ugcaauugguguaauuuggug

SEQ ID NO: 39107 - RNA, 21 nt, Artificial Sequence
  RPE65 RNA guide
ugcacugauugccucugucua

SEQ ID NO: 39108 - RNA, 21 nt, Artificial Sequence
  RPE65 RNA guide
ugcaggaaagcaucauagaca

SEQ ID NO: 39109 - RNA, 21 nt, Artificial Sequence
  RPE65 RNA guide
ugcaguccauuuggagcuugg

SEQ ID NO: 39110 - RNA, 21 nt, Artificial Sequence
  RPE65 RNA guide
ugccucugucuaugaugcuuu

SEQ ID NO: 39111 - RNA, 21 nt, Artificial Sequence
  RPE65 RNA guide
ugccuuucauagcuuuuauaa

SEQ ID NO: 39112 - RNA, 21 nt, Artificial Sequence
  RPE65 RNA guide
ugcgaauguaugauucuaacu

SEQ ID NO: 39113 - RNA, 21 nt, Artificial Sequence
  RPE65 RNA guide
ugcuagaugcaagggauagau

SEQ ID NO: 39114 - RNA, 21 nt, Artificial Sequence
  RPE65 RNA guide
ugcuagcuuauaaaagcuaug

SEQ ID NO: 39115 - RNA, 21 nt, Artificial Sequence
  RPE65 RNA guide
ugcuaggauuugaaacuuaau

SEQ ID NO: 39116 - RNA, 21 nt, Artificial Sequence
  RPE65 RNA guide
ugcuaggugauguucaggaau

SEQ ID NO: 39117 - RNA, 21 nt, Artificial Sequence
  RPE65 RNA guide
ugcugcgaauguaugauucua

SEQ ID NO: 39118 - RNA, 21 nt, Artificial Sequence
  RPE65 RNA guide
ugcuuuccauauucagaauuu

SEQ ID NO: 39119 - RNA, 21 nt, Artificial Sequence
  RPE65 RNA guide
ugcuuuccugcaauuggugua

SEQ ID NO: 39120 - RNA, 21 nt, Artificial Sequence
  RPE65 RNA guide
uggaaagcacuugauaaguau

SEQ ID NO: 39121 - RNA, 21 nt, Artificial Sequence
  RPE65 RNA guide
uggaauggucauucugugugu

SEQ ID NO: 39122 - RNA, 21 nt, Artificial Sequence
  RPE65 RNA guide
uggacugcacugauugccucu

SEQ ID NO: 39123 - RNA, 21 nt, Artificial Sequence
  RPE65 RNA guide
uggagagaacccauauaaaau

SEQ ID NO: 39124 - RNA, 21 nt, Artificial Sequence
  RPE65 RNA guide
uggagcuuggaauggucauuc

SEQ ID NO: 39125 - RNA, 21 nt, Artificial Sequence
  RPE65 RNA guide
uggauuggagagaacccauau

SEQ ID NO: 39126 - RNA, 21 nt, Artificial Sequence
  RPE65 RNA guide
uggcucucauguucuuuucac

SEQ ID NO: 39127 - RNA, 21 nt, Artificial Sequence
  RPE65 RNA guide
ugggacacagugcuaggugau

SEQ ID NO: 39128 - RNA, 21 nt, Artificial Sequence
  RPE65 RNA guide
uggguucucuccaauccaugu

SEQ ID NO: 39129 - RNA, 21 nt, Artificial Sequence
  RPE65 RNA guide
uggucauucuguguguccuca

SEQ ID NO: 39130 - RNA, 21 nt, Artificial Sequence
  RPE65 RNA guide
uggucccugccuuucauagcu

SEQ ID NO: 39131 - RNA, 21 nt, Artificial Sequence
  RPE65 RNA guide
uggugaaaagaacaugagagc

SEQ ID NO: 39132 - RNA, 21 nt, Artificial Sequence
  RPE65 RNA guide
ugguguaauuuggugaaaaga

SEQ ID NO: 39133 - RNA, 21 nt, Artificial Sequence
  RPE65 RNA guide
uguaauuuggugaaaagaaca

SEQ ID NO: 39134 - RNA, 21 nt, Artificial Sequence
  RPE65 RNA guide
uguaugauucuaacuugauga

SEQ ID NO: 39135 - RNA, 21 nt, Artificial Sequence
  RPE65 RNA guide
ugucaaauagcuagucauugu

SEQ ID NO: 39136 - RNA, 21 nt, Artificial Sequence
  RPE65 RNA guide
ugucaacaaugacuagcuauu

SEQ ID NO: 39137 - RNA, 21 nt, Artificial Sequence
  RPE65 RNA guide
uguccuaugucaaauagcuag

SEQ ID NO: 39138 - RNA, 21 nt, Artificial Sequence
  RPE65 RNA guide
uguccucaucaaguuagaauc

SEQ ID NO: 39139 - RNA, 21 nt, Artificial Sequence
  RPE65 RNA guide
ugucuaugaugcuuuccugca

SEQ ID NO: 39140 - RNA, 21 nt, Artificial Sequence
  RPE65 RNA guide
uguggcucucauguucuuuuc

SEQ ID NO: 39141 - RNA, 21 nt, Artificial Sequence
  RPE65 RNA guide
uguguccucaucaaguuagaa

SEQ ID NO: 39142 - RNA, 21 nt, Artificial Sequence
  RPE65 RNA guide
uguguguccucaucaaguuag

SEQ ID NO: 39143 - RNA, 21 nt, Artificial Sequence
  RPE65 RNA guide
uguuacccuacucauugaucu

SEQ ID NO: 39144 - RNA, 21 nt, Artificial Sequence
  RPE65 RNA guide
uguuaggcauuuuauaugggu

SEQ ID NO: 39145 - RNA, 21 nt, Artificial Sequence
  RPE65 RNA guide
uguucaggaauuuagaauuug

SEQ ID NO: 39146 - RNA, 21 nt, Artificial Sequence
  RPE65 RNA guide
uguucuuuucaccaaauuaca

SEQ ID NO: 39147 - RNA, 21 nt, Artificial Sequence
  RPE65 RNA guide
uguugacaaugcuaggauuug

SEQ ID NO: 39148 - RNA, 21 nt, Artificial Sequence
  RPE65 RNA guide
uguuuguccuaugucaaauag

SEQ ID NO: 39149 - RNA, 21 nt, Artificial Sequence
  RPE65 RNA guide
uuaaacacuuacauggauugg

SEQ ID NO: 39150 - RNA, 21 nt, Artificial Sequence
  RPE65 RNA guide
uuaaguuucaaauccuagcau

SEQ ID NO: 39151 - RNA, 21 nt, Artificial Sequence
  RPE65 RNA guide
uuaauguggcucucauguucu

SEQ ID NO: 39152 - RNA, 21 nt, Artificial Sequence
  RPE65 RNA guide
uuacaccaauugcaggaaagc

SEQ ID NO: 39153 - RNA, 21 nt, Artificial Sequence
  RPE65 RNA guide
uuacauggauuggagagaacc

SEQ ID NO: 39154 - RNA, 21 nt, Artificial Sequence
  RPE65 RNA guide
uuaccagguucaugcuagcuu

SEQ ID NO: 39155 - RNA, 21 nt, Artificial Sequence
  RPE65 RNA guide
uuacccuacucauugaucuau

SEQ ID NO: 39156 - RNA, 21 nt, Artificial Sequence
  RPE65 RNA guide
uuagaaucauacauucgcagc

SEQ ID NO: 39157 - RNA, 21 nt, Artificial Sequence
  RPE65 RNA guide
uuaggcauuuuauauggguuc

SEQ ID NO: 39158 - RNA, 21 nt, Artificial Sequence
  RPE65 RNA guide
uuauaaaagcuaugaaaggca

SEQ ID NO: 39159 - RNA, 21 nt, Artificial Sequence
  RPE65 RNA guide
uuauaagcuagcaugaaccug

SEQ ID NO: 39160 - RNA, 21 nt, Artificial Sequence
  RPE65 RNA guide
uuauauggguucucuccaauc

SEQ ID NO: 39161 - RNA, 21 nt, Artificial Sequence
  RPE65 RNA guide
uuaucaagugcuuuccauauu

SEQ ID NO: 39162 - RNA, 21 nt, Artificial Sequence
  RPE65 RNA guide
uuaugcuagaugcaagggaua

SEQ ID NO: 39163 - RNA, 21 nt, Artificial Sequence
  RPE65 RNA guide
uuauucaugcugcgaauguau

SEQ ID NO: 39164 - RNA, 21 nt, Artificial Sequence
  RPE65 RNA guide
uucaaauccuagcauugucaa

SEQ ID NO: 39165 - RNA, 21 nt, Artificial Sequence
  RPE65 RNA guide
uucaacauaaauuauucaugc

SEQ ID NO: 39166 - RNA, 21 nt, Artificial Sequence
  RPE65 RNA guide
uucaccaaauuacaccaauug

SEQ ID NO: 39167 - RNA, 21 nt, Artificial Sequence
  RPE65 RNA guide
uucagaauuuaugcuagaugc

SEQ ID NO: 39168 - RNA, 21 nt, Artificial Sequence
  RPE65 RNA guide
uucauagcuuuuauaagcuag

SEQ ID NO: 39169 - RNA, 21 nt, Artificial Sequence
  RPE65 RNA guide
uucaugcuagcuuauaaaagc

SEQ ID NO: 39170 - RNA, 21 nt, Artificial Sequence
  RPE65 RNA guide
uucaugcugcgaauguaugau

SEQ ID NO: 39171 - RNA, 21 nt, Artificial Sequence
  RPE65 RNA guide
uuccaagcuccaaauggacug

SEQ ID NO: 39172 - RNA, 21 nt, Artificial Sequence
  RPE65 RNA guide
uuccugaacaucaccuagcac

SEQ ID NO: 39173 - RNA, 21 nt, Artificial Sequence
  RPE65 RNA guide
uuccugcaauugguguaauuu

SEQ ID NO: 39174 - RNA, 21 nt, Artificial Sequence
  RPE65 RNA guide
uucgcagcaugaauaauuuau

SEQ ID NO: 39175 - RNA, 21 nt, Artificial Sequence
  RPE65 RNA guide
uucuaaauuccugaacaucac

SEQ ID NO: 39176 - RNA, 21 nt, Artificial Sequence
  RPE65 RNA guide
uucuaacuugaugaggacaca

SEQ ID NO: 39177 - RNA, 21 nt, Artificial Sequence
  RPE65 RNA guide
uucucuccaauccauguaagu

SEQ ID NO: 39178 - RNA, 21 nt, Artificial Sequence
  RPE65 RNA guide
uucugaauauggaaagcacuu

SEQ ID NO: 39179 - RNA, 21 nt, Artificial Sequence
  RPE65 RNA guide
uucuguguguccucaucaagu

SEQ ID NO: 39180 - RNA, 21 nt, Artificial Sequence
  RPE65 RNA guide
uugaaacuuaauguggcucuc

SEQ ID NO: 39181 - RNA, 21 nt, Artificial Sequence
  RPE65 RNA guide
uugacaaugcuaggauuugaa

SEQ ID NO: 39182 - RNA, 21 nt, Artificial Sequence
  RPE65 RNA guide
uugacauaggacaaacauugu

SEQ ID NO: 39183 - RNA, 21 nt, Artificial Sequence
  RPE65 RNA guide
uugaucuaucccuugcaucua

SEQ ID NO: 39184 - RNA, 21 nt, Artificial Sequence
  RPE65 RNA guide
uugaugaggacacacagaaug

SEQ ID NO: 39185 - RNA, 21 nt, Artificial Sequence
  RPE65 RNA guide
uugcaggaaagcaucauagac

SEQ ID NO: 39186 - RNA, 21 nt, Artificial Sequence
  RPE65 RNA guide
uugccucugucuaugaugcuu

SEQ ID NO: 39187 - RNA, 21 nt, Artificial Sequence
  RPE65 RNA guide
uuggaauggucauucugugug

SEQ ID NO: 39188 - RNA, 21 nt, Artificial Sequence
  RPE65 RNA guide
uuggagagaacccauauaaaa

SEQ ID NO: 39189 - RNA, 21 nt, Artificial Sequence
  RPE65 RNA guide
uuggagcuuggaauggucauu

SEQ ID NO: 39190 - RNA, 21 nt, Artificial Sequence
  RPE65 RNA guide
uuggugaaaagaacaugagag

SEQ ID NO: 39191 - RNA, 21 nt, Artificial Sequence
  RPE65 RNA guide
uugguguaauuuggugaaaag

SEQ ID NO: 39192 - RNA, 21 nt, Artificial Sequence
  RPE65 RNA guide
uugucaacaaugacuagcuau

SEQ ID NO: 39193 - RNA, 21 nt, Artificial Sequence
  RPE65 RNA guide
uuguccuaugucaaauagcua

SEQ ID NO: 39194 - RNA, 21 nt, Artificial Sequence
  RPE65 RNA guide
uuguugacaaugcuaggauuu

SEQ ID NO: 39195 - RNA, 21 nt, Artificial Sequence
  RPE65 RNA guide
uuuaaacacuuacauggauug

SEQ ID NO: 39196 - RNA, 21 nt, Artificial Sequence
  RPE65 RNA guide
uuuaccagguucaugcuagcu

SEQ ID NO: 39197 - RNA, 21 nt, Artificial Sequence
  RPE65 RNA guide
uuuauaagcuagcaugaaccu

SEQ ID NO: 39198 - RNA, 21 nt, Artificial Sequence
  RPE65 RNA guide
uuuauauggguucucuccaau

SEQ ID NO: 39199 - RNA, 21 nt, Artificial Sequence
  RPE65 RNA guide
uuuaugcuagaugcaagggau

SEQ ID NO: 39200 - RNA, 21 nt, Artificial Sequence
  RPE65 RNA guide
uuucaaauccuagcauuguca

SEQ ID NO: 39201 - RNA, 21 nt, Artificial Sequence
  RPE65 RNA guide
uuucaccaaauuacaccaauu

SEQ ID NO: 39202 - RNA, 21 nt, Artificial Sequence
  RPE65 RNA guide
uuuccugcaauugguguaauu

SEQ ID NO: 39203 - RNA, 21 nt, Artificial Sequence
  RPE65 RNA guide
uuugaaacuuaauguggcucu

SEQ ID NO: 39204 - RNA, 21 nt, Artificial Sequence
  RPE65 RNA guide
uuugacauaggacaaacauug

SEQ ID NO: 39205 - RNA, 21 nt, Artificial Sequence
  RPE65 RNA guide
uuuggagcuuggaauggucau

SEQ ID NO: 39206 - RNA, 21 nt, Artificial Sequence
  RPE65 RNA guide
uuuggugaaaagaacaugaga

SEQ ID NO: 39207 - RNA, 21 nt, Artificial Sequence
  RPE65 RNA guide
uuuguccuaugucaaauagcu

SEQ ID NO: 39208 - RNA, 21 nt, Artificial Sequence
  RPE65 RNA guide
uuuuaaacacuuacauggauu

SEQ ID NO: 39209 - RNA, 21 nt, Artificial Sequence
  RPE65 RNA guide
uuuuauaagcuagcaugaacc

SEQ ID NO: 39210 - RNA, 21 nt, Artificial Sequence
  RPE65 RNA guide
uuuuauauggguucucuccaa

SEQ ID NO: 39211 - RNA, 21 nt, Artificial Sequence
  RPE65 RNA guide
uuuucaccaaauuacaccaau

SEQ ID NO: 39212 - RNA, 22 nt, Artificial Sequence
  RPE65 RNA guide
aaaagaacaugagagccacauu

SEQ ID NO: 39213 - RNA, 22 nt, Artificial Sequence
  RPE65 RNA guide
aaaagcuaugaaaggcagggac

SEQ ID NO: 39214 - RNA, 22 nt, Artificial Sequence
  RPE65 RNA guide
aaacacuuacauggauuggaga

SEQ ID NO: 39215 - RNA, 22 nt, Artificial Sequence
  RPE65 RNA guide
aaacuuaauguggcucucaugu

SEQ ID NO: 39216 - RNA, 22 nt, Artificial Sequence
  RPE65 RNA guide
aaagaacaugagagccacauua

SEQ ID NO: 39217 - RNA, 22 nt, Artificial Sequence
  RPE65 RNA guide
aaagcacuugauaaguauuugu

SEQ ID NO: 39218 - RNA, 22 nt, Artificial Sequence
  RPE65 RNA guide
aaagcaucauagacagaggcaa

SEQ ID NO: 39219 - RNA, 22 nt, Artificial Sequence
  RPE65 RNA guide
aaagcuaugaaaggcagggacc

SEQ ID NO: 39220 - RNA, 22 nt, Artificial Sequence
  RPE65 RNA guide
aaaggcagggaccauguuaccc

SEQ ID NO: 39221 - RNA, 22 nt, Artificial Sequence
  RPE65 RNA guide
aaauagcuagucauuguugaca

SEQ ID NO: 39222 - RNA, 22 nt, Artificial Sequence
  RPE65 RNA guide
aaauccuagcauugucaacaau

SEQ ID NO: 39223 - RNA, 22 nt, Artificial Sequence
  RPE65 RNA guide
aaauggacugcacugauugccu

SEQ ID NO: 39224 - RNA, 22 nt, Artificial Sequence
  RPE65 RNA guide
aaauuacaccaauugcaggaaa

SEQ ID NO: 39225 - RNA, 22 nt, Artificial Sequence
  RPE65 RNA guide
aaauuauucaugcugcgaaugu

SEQ ID NO: 39226 - RNA, 22 nt, Artificial Sequence
  RPE65 RNA guide
aaauuccugaacaucaccuagc

SEQ ID NO: 39227 - RNA, 22 nt, Artificial Sequence
  RPE65 RNA guide
aaauucuaaauuccugaacauc

SEQ ID NO: 39228 - RNA, 22 nt, Artificial Sequence
  RPE65 RNA guide
aaauucugaauauggaaagcac

SEQ ID NO: 39229 - RNA, 22 nt, Artificial Sequence
  RPE65 RNA guide
aacaaugacuagcuauuugaca

SEQ ID NO: 39230 - RNA, 22 nt, Artificial Sequence
  RPE65 RNA guide
aacaauguuuguccuaugucaa

SEQ ID NO: 39231 - RNA, 22 nt, Artificial Sequence
  RPE65 RNA guide
aacacuuacauggauuggagag

SEQ ID NO: 39232 - RNA, 22 nt, Artificial Sequence
  RPE65 RNA guide
aacauaaauuauucaugcugcg

SEQ ID NO: 39233 - RNA, 22 nt, Artificial Sequence
  RPE65 RNA guide
aacaugagagccacauuaaguu

SEQ ID NO: 39234 - RNA, 22 nt, Artificial Sequence
  RPE65 RNA guide
aacauggucccugccuuucaua

SEQ ID NO: 39235 - RNA, 22 nt, Artificial Sequence
  RPE65 RNA guide
aacuuaauguggcucucauguu

SEQ ID NO: 39236 - RNA, 22 nt, Artificial Sequence
  RPE65 RNA guide
aacuugaugaggacacacagaa

SEQ ID NO: 39237 - RNA, 22 nt, Artificial Sequence
  RPE65 RNA guide
aagaaacaauguuuguccuaug

SEQ ID NO: 39238 - RNA, 22 nt, Artificial Sequence
  RPE65 RNA guide
aagaacaugagagccacauuaa

SEQ ID NO: 39239 - RNA, 22 nt, Artificial Sequence
  RPE65 RNA guide
aagcacuugauaaguauuugug

SEQ ID NO: 39240 - RNA, 22 nt, Artificial Sequence
  RPE65 RNA guide
aagcaucauagacagaggcaau

SEQ ID NO: 39241 - RNA, 22 nt, Artificial Sequence
  RPE65 RNA guide
aagcuagcaugaaccugguaaa

SEQ ID NO: 39242 - RNA, 22 nt, Artificial Sequence
  RPE65 RNA guide
aagcuaugaaaggcagggacca

SEQ ID NO: 39243 - RNA, 22 nt, Artificial Sequence
  RPE65 RNA guide
aagcuccaaauggacugcacug

SEQ ID NO: 39244 - RNA, 22 nt, Artificial Sequence
  RPE65 RNA guide
aaggcagggaccauguuacccu

SEQ ID NO: 39245 - RNA, 22 nt, Artificial Sequence
  RPE65 RNA guide
aagggauagaucaaugaguagg

SEQ ID NO: 39246 - RNA, 22 nt, Artificial Sequence
  RPE65 RNA guide
aaguuagaaucauacauucgca

SEQ ID NO: 39247 - RNA, 22 nt, Artificial Sequence
  RPE65 RNA guide
aaguuccaaauucuaaauuccu

SEQ ID NO: 39248 - RNA, 22 nt, Artificial Sequence
  RPE65 RNA guide
aaguuucaaauccuagcauugu

SEQ ID NO: 39249 - RNA, 22 nt, Artificial Sequence
  RPE65 RNA guide
aauagcuagucauuguugacaa

SEQ ID NO: 39250 - RNA, 22 nt, Artificial Sequence
  RPE65 RNA guide
aaucagugcaguccauuuggag

SEQ ID NO: 39251 - RNA, 22 nt, Artificial Sequence
  RPE65 RNA guide
aaucauacauucgcagcaugaa

SEQ ID NO: 39252 - RNA, 22 nt, Artificial Sequence
  RPE65 RNA guide
aauccuagcauugucaacaaug

SEQ ID NO: 39253 - RNA, 22 nt, Artificial Sequence
  RPE65 RNA guide
aaugaccauuccaagcuccaaa

SEQ ID NO: 39254 - RNA, 22 nt, Artificial Sequence
  RPE65 RNA guide
aaugacuagcuauuugacauag

SEQ ID NO: 39255 - RNA, 22 nt, Artificial Sequence
  RPE65 RNA guide
aaugaguaggguaacauggucc

SEQ ID NO: 39256 - RNA, 22 nt, Artificial Sequence
  RPE65 RNA guide
aaugcuaggauuugaaacuuaa

SEQ ID NO: 39257 - RNA, 22 nt, Artificial Sequence
  RPE65 RNA guide
aauggacugcacugauugccuc

SEQ ID NO: 39258 - RNA, 22 nt, Artificial Sequence
  RPE65 RNA guide
aauggucauucuguguguccuc

SEQ ID NO: 39259 - RNA, 22 nt, Artificial Sequence
  RPE65 RNA guide
aauguaugauucuaacuugaug

SEQ ID NO: 39260 - RNA, 22 nt, Artificial Sequence
  RPE65 RNA guide
aauguggcucucauguucuuuu

SEQ ID NO: 39261 - RNA, 22 nt, Artificial Sequence
  RPE65 RNA guide
aauguuuguccuaugucaaaua

SEQ ID NO: 39262 - RNA, 22 nt, Artificial Sequence
  RPE65 RNA guide
aauuacaccaauugcaggaaag

SEQ ID NO: 39263 - RNA, 22 nt, Artificial Sequence
  RPE65 RNA guide
aauuauucaugcugcgaaugua

SEQ ID NO: 39264 - RNA, 22 nt, Artificial Sequence
  RPE65 RNA guide
aauuccugaacaucaccuagca

SEQ ID NO: 39265 - RNA, 22 nt, Artificial Sequence
  RPE65 RNA guide
aauucuaaauuccugaacauca

SEQ ID NO: 39266 - RNA, 22 nt, Artificial Sequence
  RPE65 RNA guide
aauucugaauauggaaagcacu

SEQ ID NO: 39267 - RNA, 22 nt, Artificial Sequence
  RPE65 RNA guide
aauugcaggaaagcaucauaga

SEQ ID NO: 39268 - RNA, 22 nt, Artificial Sequence
  RPE65 RNA guide
aauugguguaauuuggugaaaa

SEQ ID NO: 39269 - RNA, 22 nt, Artificial Sequence
  RPE65 RNA guide
aauuuaugcuagaugcaaggga

SEQ ID NO: 39270 - RNA, 22 nt, Artificial Sequence
  RPE65 RNA guide
aauuuggugaaaagaacaugag

SEQ ID NO: 39271 - RNA, 22 nt, Artificial Sequence
  RPE65 RNA guide
acaaauacuuaucaagugcuuu

SEQ ID NO: 39272 - RNA, 22 nt, Artificial Sequence
  RPE65 RNA guide
acaaugacuagcuauuugacau

SEQ ID NO: 39273 - RNA, 22 nt, Artificial Sequence
  RPE65 RNA guide
acaaugcuaggauuugaaacuu

SEQ ID NO: 39274 - RNA, 22 nt, Artificial Sequence
  RPE65 RNA guide
acaauguuuguccuaugucaaa

SEQ ID NO: 39275 - RNA, 22 nt, Artificial Sequence
  RPE65 RNA guide
acacaaauacuuaucaagugcu

SEQ ID NO: 39276 - RNA, 22 nt, Artificial Sequence
  RPE65 RNA guide
acacacagaaugaccauuccaa

SEQ ID NO: 39277 - RNA, 22 nt, Artificial Sequence
  RPE65 RNA guide
acacagaaugaccauuccaagc

SEQ ID NO: 39278 - RNA, 22 nt, Artificial Sequence
  RPE65 RNA guide
acacagugcuaggugauguuca

SEQ ID NO: 39279 - RNA, 22 nt, Artificial Sequence
  RPE65 RNA guide
acaccaauugcaggaaagcauc

SEQ ID NO: 39280 - RNA, 22 nt, Artificial Sequence
  RPE65 RNA guide
acacuuacauggauuggagaga

SEQ ID NO: 39281 - RNA, 22 nt, Artificial Sequence
  RPE65 RNA guide
acagaaugaccauuccaagcuc

SEQ ID NO: 39282 - RNA, 22 nt, Artificial Sequence
  RPE65 RNA guide
acagaggcaaucagugcagucc

SEQ ID NO: 39283 - RNA, 22 nt, Artificial Sequence
  RPE65 RNA guide
acagugcuaggugauguucagg

SEQ ID NO: 39284 - RNA, 22 nt, Artificial Sequence
  RPE65 RNA guide
acauaaauuauucaugcugcga

SEQ ID NO: 39285 - RNA, 22 nt, Artificial Sequence
  RPE65 RNA guide
acauaggacaaacauuguuucu

SEQ ID NO: 39286 - RNA, 22 nt, Artificial Sequence
  RPE65 RNA guide
acaugagagccacauuaaguuu

SEQ ID NO: 39287 - RNA, 22 nt, Artificial Sequence
  RPE65 RNA guide
acauggauuggagagaacccau

SEQ ID NO: 39288 - RNA, 22 nt, Artificial Sequence
  RPE65 RNA guide
acauggucccugccuuucauag

SEQ ID NO: 39289 - RNA, 22 nt, Artificial Sequence
  RPE65 RNA guide
acauuaaguuucaaauccuagc

SEQ ID NO: 39290 - RNA, 22 nt, Artificial Sequence
  RPE65 RNA guide
acauucgcagcaugaauaauuu

SEQ ID NO: 39291 - RNA, 22 nt, Artificial Sequence
  RPE65 RNA guide
accaaauuacaccaauugcagg

SEQ ID NO: 39292 - RNA, 22 nt, Artificial Sequence
  RPE65 RNA guide
accaauugcaggaaagcaucau

SEQ ID NO: 39293 - RNA, 22 nt, Artificial Sequence
  RPE65 RNA guide
accagguucaugcuagcuuaua

SEQ ID NO: 39294 - RNA, 22 nt, Artificial Sequence
  RPE65 RNA guide
accauguuacccuacucauuga

SEQ ID NO: 39295 - RNA, 22 nt, Artificial Sequence
  RPE65 RNA guide
accauuccaagcuccaaaugga

SEQ ID NO: 39296 - RNA, 22 nt, Artificial Sequence
  RPE65 RNA guide
acccaguauuuaccagguucau

SEQ ID NO: 39297 - RNA, 22 nt, Artificial Sequence
  RPE65 RNA guide
acccauauaaaaugccuaacau

SEQ ID NO: 39298 - RNA, 22 nt, Artificial Sequence
  RPE65 RNA guide
acccuacucauugaucuauccc

SEQ ID NO: 39299 - RNA, 22 nt, Artificial Sequence
  RPE65 RNA guide
acuagcuauuugacauaggaca

SEQ ID NO: 39300 - RNA, 22 nt, Artificial Sequence
  RPE65 RNA guide
acucauugaucuaucccuugca

SEQ ID NO: 39301 - RNA, 22 nt, Artificial Sequence
  RPE65 RNA guide
acugauugccucugucuaugau

SEQ ID NO: 39302 - RNA, 22 nt, Artificial Sequence
  RPE65 RNA guide
acugcacugauugccucugucu

SEQ ID NO: 39303 - RNA, 22 nt, Artificial Sequence
  RPE65 RNA guide
acuuaauguggcucucauguuc

SEQ ID NO: 39304 - RNA, 22 nt, Artificial Sequence
  RPE65 RNA guide
acuuacauggauuggagagaac

SEQ ID NO: 39305 - RNA, 22 nt, Artificial Sequence
  RPE65 RNA guide
acuuaucaagugcuuuccauau

SEQ ID NO: 39306 - RNA, 22 nt, Artificial Sequence
  RPE65 RNA guide
acuugaugaggacacacagaau

SEQ ID NO: 39307 - RNA, 22 nt, Artificial Sequence
  RPE65 RNA guide
agaaacaauguuuguccuaugu

SEQ ID NO: 39308 - RNA, 22 nt, Artificial Sequence
  RPE65 RNA guide
agaacaugagagccacauuaag

SEQ ID NO: 39309 - RNA, 22 nt, Artificial Sequence
  RPE65 RNA guide
agaacccauauaaaaugccuaa

SEQ ID NO: 39310 - RNA, 22 nt, Artificial Sequence
  RPE65 RNA guide
agaaucauacauucgcagcaug

SEQ ID NO: 39311 - RNA, 22 nt, Artificial Sequence
  RPE65 RNA guide
agaaugaccauuccaagcucca

SEQ ID NO: 39312 - RNA, 22 nt, Artificial Sequence
  RPE65 RNA guide
agaauuuaugcuagaugcaagg

SEQ ID NO: 39313 - RNA, 22 nt, Artificial Sequence
  RPE65 RNA guide
agacagaggcaaucagugcagu

SEQ ID NO: 39314 - RNA, 22 nt, Artificial Sequence
  RPE65 RNA guide
agagaacccauauaaaaugccu

SEQ ID NO: 39315 - RNA, 22 nt, Artificial Sequence
  RPE65 RNA guide
agagaugaagaaacaauguuug

SEQ ID NO: 39316 - RNA, 22 nt, Artificial Sequence
  RPE65 RNA guide
agagccacauuaaguuucaaau

SEQ ID NO: 39317 - RNA, 22 nt, Artificial Sequence
  RPE65 RNA guide
agaggcaaucagugcaguccau

SEQ ID NO: 39318 - RNA, 22 nt, Artificial Sequence
  RPE65 RNA guide
agaucaaugaguaggguaacau

SEQ ID NO: 39319 - RNA, 22 nt, Artificial Sequence
  RPE65 RNA guide
agaugaagaaacaauguuuguc

SEQ ID NO: 39320 - RNA, 22 nt, Artificial Sequence
  RPE65 RNA guide
agaugcaagggauagaucaaug

SEQ ID NO: 39321 - RNA, 22 nt, Artificial Sequence
  RPE65 RNA guide
agcacccaguauuuaccagguu

SEQ ID NO: 39322 - RNA, 22 nt, Artificial Sequence
  RPE65 RNA guide
agcacuugauaaguauuugugu

SEQ ID NO: 39323 - RNA, 22 nt, Artificial Sequence
  RPE65 RNA guide
agcauaaauucugaauauggaa

SEQ ID NO: 39324 - RNA, 22 nt, Artificial Sequence
  RPE65 RNA guide
agcaucauagacagaggcaauc

SEQ ID NO: 39325 - RNA, 22 nt, Artificial Sequence
  RPE65 RNA guide
agcaugaaccugguaaauacug

SEQ ID NO: 39326 - RNA, 22 nt, Artificial Sequence
  RPE65 RNA guide
agcauugucaacaaugacuagc

SEQ ID NO: 39327 - RNA, 22 nt, Artificial Sequence
  RPE65 RNA guide
agccacauuaaguuucaaaucc

SEQ ID NO: 39328 - RNA, 22 nt, Artificial Sequence
  RPE65 RNA guide
agcuagcaugaaccugguaaau

SEQ ID NO: 39329 - RNA, 22 nt, Artificial Sequence
  RPE65 RNA guide
agcuagucauuguugacaaugc

SEQ ID NO: 39330 - RNA, 22 nt, Artificial Sequence
  RPE65 RNA guide
agcuaugaaaggcagggaccau

SEQ ID NO: 39331 - RNA, 22 nt, Artificial Sequence
  RPE65 RNA guide
agcuauuugacauaggacaaac

SEQ ID NO: 39332 - RNA, 22 nt, Artificial Sequence
  RPE65 RNA guide
agcuccaaauggacugcacuga

SEQ ID NO: 39333 - RNA, 22 nt, Artificial Sequence
  RPE65 RNA guide
agcuuauaaaagcuaugaaagg

SEQ ID NO: 39334 - RNA, 22 nt, Artificial Sequence
  RPE65 RNA guide
agcuuggaauggucauucugug

SEQ ID NO: 39335 - RNA, 22 nt, Artificial Sequence
  RPE65 RNA guide
agcuuuuauaagcuagcaugaa

SEQ ID NO: 39336 - RNA, 22 nt, Artificial Sequence
  RPE65 RNA guide
aggaaagcaucauagacagagg

SEQ ID NO: 39337 - RNA, 22 nt, Artificial Sequence
  RPE65 RNA guide
aggacaaacauuguuucuucau

SEQ ID NO: 39338 - RNA, 22 nt, Artificial Sequence
  RPE65 RNA guide
aggacacacagaaugaccauuc

SEQ ID NO: 39339 - RNA, 22 nt, Artificial Sequence
  RPE65 RNA guide
aggauuugaaacuuaauguggc

SEQ ID NO: 39340 - RNA, 22 nt, Artificial Sequence
  RPE65 RNA guide
aggcaaucagugcaguccauuu

SEQ ID NO: 39341 - RNA, 22 nt, Artificial Sequence
  RPE65 RNA guide
aggcagggaccauguuacccua

SEQ ID NO: 39342 - RNA, 22 nt, Artificial Sequence
  RPE65 RNA guide
aggcauuuuauauggguucucu

SEQ ID NO: 39343 - RNA, 22 nt, Artificial Sequence
  RPE65 RNA guide
agggaccauguuacccuacuca

SEQ ID NO: 39344 - RNA, 22 nt, Artificial Sequence
  RPE65 RNA guide
agggauagaucaaugaguaggg

SEQ ID NO: 39345 - RNA, 22 nt, Artificial Sequence
  RPE65 RNA guide
aggguaacauggucccugccuu

SEQ ID NO: 39346 - RNA, 22 nt, Artificial Sequence
  RPE65 RNA guide
aggugauguucaggaauuuaga

SEQ ID NO: 39347 - RNA, 22 nt, Artificial Sequence
  RPE65 RNA guide
agguucaugcuagcuuauaaaa

SEQ ID NO: 39348 - RNA, 22 nt, Artificial Sequence
  RPE65 RNA guide
aguaggguaacauggucccugc

SEQ ID NO: 39349 - RNA, 22 nt, Artificial Sequence
  RPE65 RNA guide
aguauuuaccagguucaugcua

SEQ ID NO: 39350 - RNA, 22 nt, Artificial Sequence
  RPE65 RNA guide
agucauuguugacaaugcuagg

SEQ ID NO: 39351 - RNA, 22 nt, Artificial Sequence
  RPE65 RNA guide
aguccauuuggagcuuggaaug

SEQ ID NO: 39352 - RNA, 22 nt, Artificial Sequence
  RPE65 RNA guide
agugcaguccauuuggagcuug

SEQ ID NO: 39353 - RNA, 22 nt, Artificial Sequence
  RPE65 RNA guide
agugcuaggugauguucaggaa

SEQ ID NO: 39354 - RNA, 22 nt, Artificial Sequence
  RPE65 RNA guide
agugcuuuccauauucagaauu

SEQ ID NO: 39355 - RNA, 22 nt, Artificial Sequence
  RPE65 RNA guide
aguuagaaucauacauucgcag

SEQ ID NO: 39356 - RNA, 22 nt, Artificial Sequence
  RPE65 RNA guide
aguuccaaauucuaaauuccug

SEQ ID NO: 39357 - RNA, 22 nt, Artificial Sequence
  RPE65 RNA guide
aguuucaaauccuagcauuguc

SEQ ID NO: 39358 - RNA, 22 nt, Artificial Sequence
  RPE65 RNA guide
auaaaagcuaugaaaggcaggg

SEQ ID NO: 39359 - RNA, 22 nt, Artificial Sequence
  RPE65 RNA guide
auaagcuagcaugaaccuggua

SEQ ID NO: 39360 - RNA, 22 nt, Artificial Sequence
  RPE65 RNA guide
auacuuaucaagugcuuuccau

SEQ ID NO: 39361 - RNA, 22 nt, Artificial Sequence
  RPE65 RNA guide
auagacagaggcaaucagugca

SEQ ID NO: 39362 - RNA, 22 nt, Artificial Sequence
  RPE65 RNA guide
auagaucaaugaguaggguaac

SEQ ID NO: 39363 - RNA, 22 nt, Artificial Sequence
  RPE65 RNA guide
auagcuagucauuguugacaau

SEQ ID NO: 39364 - RNA, 22 nt, Artificial Sequence
  RPE65 RNA guide
auagcuuuuauaagcuagcaug

SEQ ID NO: 39365 - RNA, 22 nt, Artificial Sequence
  RPE65 RNA guide
auaggacaaacauuguuucuuc

SEQ ID NO: 39366 - RNA, 22 nt, Artificial Sequence
  RPE65 RNA guide
auauggguucucuccaauccau

SEQ ID NO: 39367 - RNA, 22 nt, Artificial Sequence
  RPE65 RNA guide
auauguuaggcauuuuauaugg

SEQ ID NO: 39368 - RNA, 22 nt, Artificial Sequence
  RPE65 RNA guide
aucaagugcuuuccauauucag

SEQ ID NO: 39369 - RNA, 22 nt, Artificial Sequence
  RPE65 RNA guide
aucaaguuagaaucauacauuc

SEQ ID NO: 39370 - RNA, 22 nt, Artificial Sequence
  RPE65 RNA guide
aucaaugaguaggguaacaugg

SEQ ID NO: 39371 - RNA, 22 nt, Artificial Sequence
  RPE65 RNA guide
aucagugcaguccauuuggagc

SEQ ID NO: 39372 - RNA, 22 nt, Artificial Sequence
  RPE65 RNA guide
aucauacauucgcagcaugaau

SEQ ID NO: 39373 - RNA, 22 nt, Artificial Sequence
  RPE65 RNA guide
aucauagacagaggcaaucagu

SEQ ID NO: 39374 - RNA, 22 nt, Artificial Sequence
  RPE65 RNA guide
aucccuugcaucuagcauaaau

SEQ ID NO: 39375 - RNA, 22 nt, Artificial Sequence
  RPE65 RNA guide
auccuagcauugucaacaauga

SEQ ID NO: 39376 - RNA, 22 nt, Artificial Sequence
  RPE65 RNA guide
aucuaucccuugcaucuagcau

SEQ ID NO: 39377 - RNA, 22 nt, Artificial Sequence
  RPE65 RNA guide
augaaaggcagggaccauguua

SEQ ID NO: 39378 - RNA, 22 nt, Artificial Sequence
  RPE65 RNA guide
augaaccugguaaauacugggu

SEQ ID NO: 39379 - RNA, 22 nt, Artificial Sequence
  RPE65 RNA guide
augaagaaacaauguuuguccu

SEQ ID NO: 39380 - RNA, 22 nt, Artificial Sequence
  RPE65 RNA guide
augacacaaauacuuaucaagu

SEQ ID NO: 39381 - RNA, 22 nt, Artificial Sequence
  RPE65 RNA guide
augaccauuccaagcuccaaau

SEQ ID NO: 39382 - RNA, 22 nt, Artificial Sequence
  RPE65 RNA guide
augacuagcuauuugacauagg

SEQ ID NO: 39383 - RNA, 22 nt, Artificial Sequence
  RPE65 RNA guide
augagagccacauuaaguuuca

SEQ ID NO: 39384 - RNA, 22 nt, Artificial Sequence
  RPE65 RNA guide
augaggacacacagaaugacca

SEQ ID NO: 39385 - RNA, 22 nt, Artificial Sequence
  RPE65 RNA guide
augaguaggguaacaugguccc

SEQ ID NO: 39386 - RNA, 22 nt, Artificial Sequence
  RPE65 RNA guide
augaugcuuuccugcaauuggu

SEQ ID NO: 39387 - RNA, 22 nt, Artificial Sequence
  RPE65 RNA guide
augauucuaacuugaugaggac

SEQ ID NO: 39388 - RNA, 22 nt, Artificial Sequence
  RPE65 RNA guide
augcaagggauagaucaaugag

SEQ ID NO: 39389 - RNA, 22 nt, Artificial Sequence
  RPE65 RNA guide
augcuagaugcaagggauagau

SEQ ID NO: 39390 - RNA, 22 nt, Artificial Sequence
  RPE65 RNA guide
augcuagcuuauaaaagcuaug

SEQ ID NO: 39391 - RNA, 22 nt, Artificial Sequence
  RPE65 RNA guide
augcuaggauuugaaacuuaau

SEQ ID NO: 39392 - RNA, 22 nt, Artificial Sequence
  RPE65 RNA guide
augcugcgaauguaugauucua

SEQ ID NO: 39393 - RNA, 22 nt, Artificial Sequence
  RPE65 RNA guide
augcuuuccugcaauuggugua

SEQ ID NO: 39394 - RNA, 22 nt, Artificial Sequence
  RPE65 RNA guide
auggaaagcacuugauaaguau

SEQ ID NO: 39395 - RNA, 22 nt, Artificial Sequence
  RPE65 RNA guide
auggacugcacugauugccucu

SEQ ID NO: 39396 - RNA, 22 nt, Artificial Sequence
  RPE65 RNA guide
auggauuggagagaacccauau

SEQ ID NO: 39397 - RNA, 22 nt, Artificial Sequence
  RPE65 RNA guide
auggguucucuccaauccaugu

SEQ ID NO: 39398 - RNA, 22 nt, Artificial Sequence
  RPE65 RNA guide
auggucauucuguguguccuca

SEQ ID NO: 39399 - RNA, 22 nt, Artificial Sequence
  RPE65 RNA guide
auggucccugccuuucauagcu

SEQ ID NO: 39400 - RNA, 22 nt, Artificial Sequence
  RPE65 RNA guide
auguaugauucuaacuugauga

SEQ ID NO: 39401 - RNA, 22 nt, Artificial Sequence
  RPE65 RNA guide
augucaaauagcuagucauugu

SEQ ID NO: 39402 - RNA, 22 nt, Artificial Sequence
  RPE65 RNA guide
auguggcucucauguucuuuuc

SEQ ID NO: 39403 - RNA, 22 nt, Artificial Sequence
  RPE65 RNA guide
auguuacccuacucauugaucu

SEQ ID NO: 39404 - RNA, 22 nt, Artificial Sequence
  RPE65 RNA guide
auguuaggcauuuuauaugggu

SEQ ID NO: 39405 - RNA, 22 nt, Artificial Sequence
  RPE65 RNA guide
auguucaggaauuuagaauuug

SEQ ID NO: 39406 - RNA, 22 nt, Artificial Sequence
  RPE65 RNA guide
auguucuuuucaccaaauuaca

SEQ ID NO: 39407 - RNA, 22 nt, Artificial Sequence
  RPE65 RNA guide
auguuuguccuaugucaaauag

SEQ ID NO: 39408 - RNA, 22 nt, Artificial Sequence
  RPE65 RNA guide
auuaaguuucaaauccuagcau

SEQ ID NO: 39409 - RNA, 22 nt, Artificial Sequence
  RPE65 RNA guide
auuacaccaauugcaggaaagc

SEQ ID NO: 39410 - RNA, 22 nt, Artificial Sequence
  RPE65 RNA guide
auuauucaugcugcgaauguau

SEQ ID NO: 39411 - RNA, 22 nt, Artificial Sequence
  RPE65 RNA guide
auucaacauaaauuauucaugc

SEQ ID NO: 39412 - RNA, 22 nt, Artificial Sequence
  RPE65 RNA guide
auucagaauuuaugcuagaugc

SEQ ID NO: 39413 - RNA, 22 nt, Artificial Sequence
  RPE65 RNA guide
auucaugcugcgaauguaugau

SEQ ID NO: 39414 - RNA, 22 nt, Artificial Sequence
  RPE65 RNA guide
auuccaagcuccaaauggacug

SEQ ID NO: 39415 - RNA, 22 nt, Artificial Sequence
  RPE65 RNA guide
auuccugaacaucaccuagcac

SEQ ID NO: 39416 - RNA, 22 nt, Artificial Sequence
  RPE65 RNA guide
auucgcagcaugaauaauuuau

SEQ ID NO: 39417 - RNA, 22 nt, Artificial Sequence
  RPE65 RNA guide
auucuaaauuccugaacaucac

SEQ ID NO: 39418 - RNA, 22 nt, Artificial Sequence
  RPE65 RNA guide
auucuaacuugaugaggacaca

SEQ ID NO: 39419 - RNA, 22 nt, Artificial Sequence
  RPE65 RNA guide
auucugaauauggaaagcacuu

SEQ ID NO: 39420 - RNA, 22 nt, Artificial Sequence
  RPE65 RNA guide
auucuguguguccucaucaagu

SEQ ID NO: 39421 - RNA, 22 nt, Artificial Sequence
  RPE65 RNA guide
auugaucuaucccuugcaucua

SEQ ID NO: 39422 - RNA, 22 nt, Artificial Sequence
  RPE65 RNA guide
auugcaggaaagcaucauagac

SEQ ID NO: 39423 - RNA, 22 nt, Artificial Sequence
  RPE65 RNA guide
auugccucugucuaugaugcuu

SEQ ID NO: 39424 - RNA, 22 nt, Artificial Sequence
  RPE65 RNA guide
auuggagagaacccauauaaaa

SEQ ID NO: 39425 - RNA, 22 nt, Artificial Sequence
  RPE65 RNA guide
auugguguaauuuggugaaaag

SEQ ID NO: 39426 - RNA, 22 nt, Artificial Sequence
  RPE65 RNA guide
auugucaacaaugacuagcuau

SEQ ID NO: 39427 - RNA, 22 nt, Artificial Sequence
  RPE65 RNA guide
auuguugacaaugcuaggauuu

SEQ ID NO: 39428 - RNA, 22 nt, Artificial Sequence
  RPE65 RNA guide
auuuaccagguucaugcuagcu

SEQ ID NO: 39429 - RNA, 22 nt, Artificial Sequence
  RPE65 RNA guide
auuuaugcuagaugcaagggau

SEQ ID NO: 39430 - RNA, 22 nt, Artificial Sequence
  RPE65 RNA guide
auuugaaacuuaauguggcucu

SEQ ID NO: 39431 - RNA, 22 nt, Artificial Sequence
  RPE65 RNA guide
auuugacauaggacaaacauug

SEQ ID NO: 39432 - RNA, 22 nt, Artificial Sequence
  RPE65 RNA guide
auuuggagcuuggaauggucau

SEQ ID NO: 39433 - RNA, 22 nt, Artificial Sequence
  RPE65 RNA guide
auuuggugaaaagaacaugaga

SEQ ID NO: 39434 - RNA, 22 nt, Artificial Sequence
  RPE65 RNA guide
auuuuaaacacuuacauggauu

SEQ ID NO: 39435 - RNA, 22 nt, Artificial Sequence
  RPE65 RNA guide
auuuuauauggguucucuccaa

SEQ ID NO: 39436 - RNA, 22 nt, Artificial Sequence
  RPE65 RNA guide
caaauacuuaucaagugcuuuc

SEQ ID NO: 39437 - RNA, 22 nt, Artificial Sequence
  RPE65 RNA guide
caaauagcuagucauuguugac

SEQ ID NO: 39438 - RNA, 22 nt, Artificial Sequence
  RPE65 RNA guide
caaauccuagcauugucaacaa

SEQ ID NO: 39439 - RNA, 22 nt, Artificial Sequence
  RPE65 RNA guide
caaauggacugcacugauugcc

SEQ ID NO: 39440 - RNA, 22 nt, Artificial Sequence
  RPE65 RNA guide
caaauuacaccaauugcaggaa

SEQ ID NO: 39441 - RNA, 22 nt, Artificial Sequence
  RPE65 RNA guide
caaauucuaaauuccugaacau

SEQ ID NO: 39442 - RNA, 22 nt, Artificial Sequence
  RPE65 RNA guide
caacaaugacuagcuauuugac

SEQ ID NO: 39443 - RNA, 22 nt, Artificial Sequence
  RPE65 RNA guide
caacauaaauuauucaugcugc

SEQ ID NO: 39444 - RNA, 22 nt, Artificial Sequence
  RPE65 RNA guide
caagcuccaaauggacugcacu

SEQ ID NO: 39445 - RNA, 22 nt, Artificial Sequence
  RPE65 RNA guide
caagggauagaucaaugaguag

SEQ ID NO: 39446 - RNA, 22 nt, Artificial Sequence
  RPE65 RNA guide
caagugcuuuccauauucagaa

SEQ ID NO: 39447 - RNA, 22 nt, Artificial Sequence
  RPE65 RNA guide
caaguuagaaucauacauucgc

SEQ ID NO: 39448 - RNA, 22 nt, Artificial Sequence
  RPE65 RNA guide
caaucagugcaguccauuugga

SEQ ID NO: 39449 - RNA, 22 nt, Artificial Sequence
  RPE65 RNA guide
caaugacuagcuauuugacaua

SEQ ID NO: 39450 - RNA, 22 nt, Artificial Sequence
  RPE65 RNA guide
caaugaguaggguaacaugguc

SEQ ID NO: 39451 - RNA, 22 nt, Artificial Sequence
  RPE65 RNA guide
caaugcuaggauuugaaacuua

SEQ ID NO: 39452 - RNA, 22 nt, Artificial Sequence
  RPE65 RNA guide
caauguuuguccuaugucaaau

SEQ ID NO: 39453 - RNA, 22 nt, Artificial Sequence
  RPE65 RNA guide
caauugcaggaaagcaucauag

SEQ ID NO: 39454 - RNA, 22 nt, Artificial Sequence
  RPE65 RNA guide
caauugguguaauuuggugaaa

SEQ ID NO: 39455 - RNA, 22 nt, Artificial Sequence
  RPE65 RNA guide
cacaaauacuuaucaagugcuu

SEQ ID NO: 39456 - RNA, 22 nt, Artificial Sequence
  RPE65 RNA guide
cacacagaaugaccauuccaag

SEQ ID NO: 39457 - RNA, 22 nt, Artificial Sequence
  RPE65 RNA guide
cacagaaugaccauuccaagcu

SEQ ID NO: 39458 - RNA, 22 nt, Artificial Sequence
  RPE65 RNA guide
cacagugcuaggugauguucag

SEQ ID NO: 39459 - RNA, 22 nt, Artificial Sequence
  RPE65 RNA guide
cacauuaaguuucaaauccuag

SEQ ID NO: 39460 - RNA, 22 nt, Artificial Sequence
  RPE65 RNA guide
caccaaauuacaccaauugcag

SEQ ID NO: 39461 - RNA, 22 nt, Artificial Sequence
  RPE65 RNA guide
caccaauugcaggaaagcauca

SEQ ID NO: 39462 - RNA, 22 nt, Artificial Sequence
  RPE65 RNA guide
cacccaguauuuaccagguuca

SEQ ID NO: 39463 - RNA, 22 nt, Artificial Sequence
  RPE65 RNA guide
cacugauugccucugucuauga

SEQ ID NO: 39464 - RNA, 22 nt, Artificial Sequence
  RPE65 RNA guide
cacuuacauggauuggagagaa

SEQ ID NO: 39465 - RNA, 22 nt, Artificial Sequence
  RPE65 RNA guide
cacuugauaaguauuuguguca

SEQ ID NO: 39466 - RNA, 22 nt, Artificial Sequence
  RPE65 RNA guide
cagaaugaccauuccaagcucc

SEQ ID NO: 39467 - RNA, 22 nt, Artificial Sequence
  RPE65 RNA guide
cagaauuuaugcuagaugcaag

SEQ ID NO: 39468 - RNA, 22 nt, Artificial Sequence
  RPE65 RNA guide
cagaggcaaucagugcagucca

SEQ ID NO: 39469 - RNA, 22 nt, Artificial Sequence
  RPE65 RNA guide
caggaaagcaucauagacagag

SEQ ID NO: 39470 - RNA, 22 nt, Artificial Sequence
  RPE65 RNA guide
cagggaccauguuacccuacuc

SEQ ID NO: 39471 - RNA, 22 nt, Artificial Sequence
  RPE65 RNA guide
cagguucaugcuagcuuauaaa

SEQ ID NO: 39472 - RNA, 22 nt, Artificial Sequence
  RPE65 RNA guide
caguauuuaccagguucaugcu

SEQ ID NO: 39473 - RNA, 22 nt, Artificial Sequence
  RPE65 RNA guide
caguccauuuggagcuuggaau

SEQ ID NO: 39474 - RNA, 22 nt, Artificial Sequence
  RPE65 RNA guide
cagugcaguccauuuggagcuu

SEQ ID NO: 39475 - RNA, 22 nt, Artificial Sequence
  RPE65 RNA guide
cagugcuaggugauguucagga

SEQ ID NO: 39476 - RNA, 22 nt, Artificial Sequence
  RPE65 RNA guide
cauaaauuauucaugcugcgaa

SEQ ID NO: 39477 - RNA, 22 nt, Artificial Sequence
  RPE65 RNA guide
cauaaauucugaauauggaaag

SEQ ID NO: 39478 - RNA, 22 nt, Artificial Sequence
  RPE65 RNA guide
cauacauucgcagcaugaauaa

SEQ ID NO: 39479 - RNA, 22 nt, Artificial Sequence
  RPE65 RNA guide
cauagacagaggcaaucagugc

SEQ ID NO: 39480 - RNA, 22 nt, Artificial Sequence
  RPE65 RNA guide
cauagcuuuuauaagcuagcau

SEQ ID NO: 39481 - RNA, 22 nt, Artificial Sequence
  RPE65 RNA guide
cauaggacaaacauuguuucuu

SEQ ID NO: 39482 - RNA, 22 nt, Artificial Sequence
  RPE65 RNA guide
cauauucagaauuuaugcuaga

SEQ ID NO: 39483 - RNA, 22 nt, Artificial Sequence
  RPE65 RNA guide
cauauucauucauucauucaug

SEQ ID NO: 39484 - RNA, 22 nt, Artificial Sequence
  RPE65 RNA guide
caucaaguuagaaucauacauu

SEQ ID NO: 39485 - RNA, 22 nt, Artificial Sequence
  RPE65 RNA guide
caucauagacagaggcaaucag

SEQ ID NO: 39486 - RNA, 22 nt, Artificial Sequence
  RPE65 RNA guide
caucuagcauaaauucugaaua

SEQ ID NO: 39487 - RNA, 22 nt, Artificial Sequence
  RPE65 RNA guide
caugaaccugguaaauacuggg

SEQ ID NO: 39488 - RNA, 22 nt, Artificial Sequence
  RPE65 RNA guide
caugacacaaauacuuaucaag

SEQ ID NO: 39489 - RNA, 22 nt, Artificial Sequence
  RPE65 RNA guide
caugagagccacauuaaguuuc

SEQ ID NO: 39490 - RNA, 22 nt, Artificial Sequence
  RPE65 RNA guide
caugcuagcuuauaaaagcuau

SEQ ID NO: 39491 - RNA, 22 nt, Artificial Sequence
  RPE65 RNA guide
caugcugcgaauguaugauucu

SEQ ID NO: 39492 - RNA, 22 nt, Artificial Sequence
  RPE65 RNA guide
cauggauuggagagaacccaua

SEQ ID NO: 39493 - RNA, 22 nt, Artificial Sequence
  RPE65 RNA guide
cauggucccugccuuucauagc

SEQ ID NO: 39494 - RNA, 22 nt, Artificial Sequence
  RPE65 RNA guide
cauguuacccuacucauugauc

SEQ ID NO: 39495 - RNA, 22 nt, Artificial Sequence
  RPE65 RNA guide
cauguucuuuucaccaaauuac

SEQ ID NO: 39496 - RNA, 22 nt, Artificial Sequence
  RPE65 RNA guide
cauuaaguuucaaauccuagca

SEQ ID NO: 39497 - RNA, 22 nt, Artificial Sequence
  RPE65 RNA guide
cauucaugacacaaauacuuau

SEQ ID NO: 39498 - RNA, 22 nt, Artificial Sequence
  RPE65 RNA guide
cauucauucauucaugacacaa

SEQ ID NO: 39499 - RNA, 22 nt, Artificial Sequence
  RPE65 RNA guide
cauuccaagcuccaaauggacu

SEQ ID NO: 39500 - RNA, 22 nt, Artificial Sequence
  RPE65 RNA guide
cauucgcagcaugaauaauuua

SEQ ID NO: 39501 - RNA, 22 nt, Artificial Sequence
  RPE65 RNA guide
cauucuguguguccucaucaag

SEQ ID NO: 39502 - RNA, 22 nt, Artificial Sequence
  RPE65 RNA guide
cauugaucuaucccuugcaucu

SEQ ID NO: 39503 - RNA, 22 nt, Artificial Sequence
  RPE65 RNA guide
cauugucaacaaugacuagcua

SEQ ID NO: 39504 - RNA, 22 nt, Artificial Sequence
  RPE65 RNA guide
cauuguugacaaugcuaggauu

SEQ ID NO: 39505 - RNA, 22 nt, Artificial Sequence
  RPE65 RNA guide
cauuuggagcuuggaaugguca

SEQ ID NO: 39506 - RNA, 22 nt, Artificial Sequence
  RPE65 RNA guide
cauuuuauauggguucucucca

SEQ ID NO: 39507 - RNA, 22 nt, Artificial Sequence
  RPE65 RNA guide
ccaaauggacugcacugauugc

SEQ ID NO: 39508 - RNA, 22 nt, Artificial Sequence
  RPE65 RNA guide
ccaaauuacaccaauugcagga

SEQ ID NO: 39509 - RNA, 22 nt, Artificial Sequence
  RPE65 RNA guide
ccaaauucuaaauuccugaaca

SEQ ID NO: 39510 - RNA, 22 nt, Artificial Sequence
  RPE65 RNA guide
ccaagcuccaaauggacugcac

SEQ ID NO: 39511 - RNA, 22 nt, Artificial Sequence
  RPE65 RNA guide
ccaauugcaggaaagcaucaua

SEQ ID NO: 39512 - RNA, 22 nt, Artificial Sequence
  RPE65 RNA guide
ccacauuaaguuucaaauccua

SEQ ID NO: 39513 - RNA, 22 nt, Artificial Sequence
  RPE65 RNA guide
ccagguucaugcuagcuuauaa

SEQ ID NO: 39514 - RNA, 22 nt, Artificial Sequence
  RPE65 RNA guide
ccaguauuuaccagguucaugc

SEQ ID NO: 39515 - RNA, 22 nt, Artificial Sequence
  RPE65 RNA guide
ccauauucagaauuuaugcuag

SEQ ID NO: 39516 - RNA, 22 nt, Artificial Sequence
  RPE65 RNA guide
ccauguuacccuacucauugau

SEQ ID NO: 39517 - RNA, 22 nt, Artificial Sequence
  RPE65 RNA guide
ccauuccaagcuccaaauggac

SEQ ID NO: 39518 - RNA, 22 nt, Artificial Sequence
  RPE65 RNA guide
ccauuuggagcuuggaaugguc

SEQ ID NO: 39519 - RNA, 22 nt, Artificial Sequence
  RPE65 RNA guide
cccaguauuuaccagguucaug

SEQ ID NO: 39520 - RNA, 22 nt, Artificial Sequence
  RPE65 RNA guide
cccauauaaaaugccuaacaua

SEQ ID NO: 39521 - RNA, 22 nt, Artificial Sequence
  RPE65 RNA guide
cccuacucauugaucuaucccu

SEQ ID NO: 39522 - RNA, 22 nt, Artificial Sequence
  RPE65 RNA guide
cccugccuuucauagcuuuuau

SEQ ID NO: 39523 - RNA, 22 nt, Artificial Sequence
  RPE65 RNA guide
cccuugcaucuagcauaaauuc

SEQ ID NO: 39524 - RNA, 22 nt, Artificial Sequence
  RPE65 RNA guide
ccuacucauugaucuaucccuu

SEQ ID NO: 39525 - RNA, 22 nt, Artificial Sequence
  RPE65 RNA guide
ccuagcauugucaacaaugacu

SEQ ID NO: 39526 - RNA, 22 nt, Artificial Sequence
  RPE65 RNA guide
ccuaugucaaauagcuagucau

SEQ ID NO: 39527 - RNA, 22 nt, Artificial Sequence
  RPE65 RNA guide
ccucaucaaguuagaaucauac

SEQ ID NO: 39528 - RNA, 22 nt, Artificial Sequence
  RPE65 RNA guide
ccucugucuaugaugcuuuccu

SEQ ID NO: 39529 - RNA, 22 nt, Artificial Sequence
  RPE65 RNA guide
ccugaacaucaccuagcacugu

SEQ ID NO: 39530 - RNA, 22 nt, Artificial Sequence
  RPE65 RNA guide
ccugcaauugguguaauuuggu

SEQ ID NO: 39531 - RNA, 22 nt, Artificial Sequence
  RPE65 RNA guide
ccugccuuucauagcuuuuaua

SEQ ID NO: 39532 - RNA, 22 nt, Artificial Sequence
  RPE65 RNA guide
ccuugcaucuagcauaaauucu

SEQ ID NO: 39533 - RNA, 22 nt, Artificial Sequence
  RPE65 RNA guide
ccuuucauagcuuuuauaagcu

SEQ ID NO: 39534 - RNA, 22 nt, Artificial Sequence
  RPE65 RNA guide
cgaauguaugauucuaacuuga

SEQ ID NO: 39535 - RNA, 22 nt, Artificial Sequence
  RPE65 RNA guide
cgcagcaugaauaauuuauguu

SEQ ID NO: 39536 - RNA, 22 nt, Artificial Sequence
  RPE65 RNA guide
cuaaauuccugaacaucaccua

SEQ ID NO: 39537 - RNA, 22 nt, Artificial Sequence
  RPE65 RNA guide
cuaacuugaugaggacacacag

SEQ ID NO: 39538 - RNA, 22 nt, Artificial Sequence
  RPE65 RNA guide
cuacucauugaucuaucccuug

SEQ ID NO: 39539 - RNA, 22 nt, Artificial Sequence
  RPE65 RNA guide
cuagaugcaagggauagaucaa

SEQ ID NO: 39540 - RNA, 22 nt, Artificial Sequence
  RPE65 RNA guide
cuagcauaaauucugaauaugg

SEQ ID NO: 39541 - RNA, 22 nt, Artificial Sequence
  RPE65 RNA guide
cuagcaugaaccugguaaauac

SEQ ID NO: 39542 - RNA, 22 nt, Artificial Sequence
  RPE65 RNA guide
cuagcauugucaacaaugacua

SEQ ID NO: 39543 - RNA, 22 nt, Artificial Sequence
  RPE65 RNA guide
cuagcuauuugacauaggacaa

SEQ ID NO: 39544 - RNA, 22 nt, Artificial Sequence
  RPE65 RNA guide
cuagcuuauaaaagcuaugaaa

SEQ ID NO: 39545 - RNA, 22 nt, Artificial Sequence
  RPE65 RNA guide
cuaggauuugaaacuuaaugug

SEQ ID NO: 39546 - RNA, 22 nt, Artificial Sequence
  RPE65 RNA guide
cuaggugauguucaggaauuua

SEQ ID NO: 39547 - RNA, 22 nt, Artificial Sequence
  RPE65 RNA guide
cuagucauuguugacaaugcua

SEQ ID NO: 39548 - RNA, 22 nt, Artificial Sequence
  RPE65 RNA guide
cuaucccuugcaucuagcauaa

SEQ ID NO: 39549 - RNA, 22 nt, Artificial Sequence
  RPE65 RNA guide
cuaugaaaggcagggaccaugu

SEQ ID NO: 39550 - RNA, 22 nt, Artificial Sequence
  RPE65 RNA guide
cuaugaugcuuuccugcaauug

SEQ ID NO: 39551 - RNA, 22 nt, Artificial Sequence
  RPE65 RNA guide
cuaugucaaauagcuagucauu

SEQ ID NO: 39552 - RNA, 22 nt, Artificial Sequence
  RPE65 RNA guide
cuauuugacauaggacaaacau

SEQ ID NO: 39553 - RNA, 22 nt, Artificial Sequence
  RPE65 RNA guide
cucaucaaguuagaaucauaca

SEQ ID NO: 39554 - RNA, 22 nt, Artificial Sequence
  RPE65 RNA guide
cucauguucuuuucaccaaauu

SEQ ID NO: 39555 - RNA, 22 nt, Artificial Sequence
  RPE65 RNA guide
cucauugaucuaucccuugcau

SEQ ID NO: 39556 - RNA, 22 nt, Artificial Sequence
  RPE65 RNA guide
cuccaaauggacugcacugauu

SEQ ID NO: 39557 - RNA, 22 nt, Artificial Sequence
  RPE65 RNA guide
cuccaauccauguaaguguuua

SEQ ID NO: 39558 - RNA, 22 nt, Artificial Sequence
  RPE65 RNA guide
cucucauguucuuuucaccaaa

SEQ ID NO: 39559 - RNA, 22 nt, Artificial Sequence
  RPE65 RNA guide
cucuccaauccauguaaguguu

SEQ ID NO: 39560 - RNA, 22 nt, Artificial Sequence
  RPE65 RNA guide
cucugucuaugaugcuuuccug

SEQ ID NO: 39561 - RNA, 22 nt, Artificial Sequence
  RPE65 RNA guide
cugaacaucaccuagcacugug

SEQ ID NO: 39562 - RNA, 22 nt, Artificial Sequence
  RPE65 RNA guide
cugaauauggaaagcacuugau

SEQ ID NO: 39563 - RNA, 22 nt, Artificial Sequence
  RPE65 RNA guide
cugauugccucugucuaugaug

SEQ ID NO: 39564 - RNA, 22 nt, Artificial Sequence
  RPE65 RNA guide
cugcaauugguguaauuuggug

SEQ ID NO: 39565 - RNA, 22 nt, Artificial Sequence
  RPE65 RNA guide
cugcacugauugccucugucua

SEQ ID NO: 39566 - RNA, 22 nt, Artificial Sequence
  RPE65 RNA guide
cugccuuucauagcuuuuauaa

SEQ ID NO: 39567 - RNA, 22 nt, Artificial Sequence
  RPE65 RNA guide
cugcgaauguaugauucuaacu

SEQ ID NO: 39568 - RNA, 22 nt, Artificial Sequence
  RPE65 RNA guide
cugucuaugaugcuuuccugca

SEQ ID NO: 39569 - RNA, 22 nt, Artificial Sequence
  RPE65 RNA guide
cuguguguccucaucaaguuag

SEQ ID NO: 39570 - RNA, 22 nt, Artificial Sequence
  RPE65 RNA guide
cuuaauguggcucucauguucu

SEQ ID NO: 39571 - RNA, 22 nt, Artificial Sequence
  RPE65 RNA guide
cuuacauggauuggagagaacc

SEQ ID NO: 39572 - RNA, 22 nt, Artificial Sequence
  RPE65 RNA guide
cuuauaaaagcuaugaaaggca

SEQ ID NO: 39573 - RNA, 22 nt, Artificial Sequence
  RPE65 RNA guide
cuuaucaagugcuuuccauauu

SEQ ID NO: 39574 - RNA, 22 nt, Artificial Sequence
  RPE65 RNA guide
cuugauaaguauuugugucaug

SEQ ID NO: 39575 - RNA, 22 nt, Artificial Sequence
  RPE65 RNA guide
cuugaugaggacacacagaaug

SEQ ID NO: 39576 - RNA, 22 nt, Artificial Sequence
  RPE65 RNA guide
cuugcaucuagcauaaauucug

SEQ ID NO: 39577 - RNA, 22 nt, Artificial Sequence
  RPE65 RNA guide
cuuggaauggucauucugugug

SEQ ID NO: 39578 - RNA, 22 nt, Artificial Sequence
  RPE65 RNA guide
cuuucauagcuuuuauaagcua

SEQ ID NO: 39579 - RNA, 22 nt, Artificial Sequence
  RPE65 RNA guide
cuuuccauauucagaauuuaug

SEQ ID NO: 39580 - RNA, 22 nt, Artificial Sequence
  RPE65 RNA guide
cuuuccugcaauugguguaauu

SEQ ID NO: 39581 - RNA, 22 nt, Artificial Sequence
  RPE65 RNA guide
cuuuuauaagcuagcaugaacc

SEQ ID NO: 39582 - RNA, 22 nt, Artificial Sequence
  RPE65 RNA guide
cuuuucaccaaauuacaccaau

SEQ ID NO: 39583 - RNA, 22 nt, Artificial Sequence
  RPE65 RNA guide
gaaaagaacaugagagccacau

SEQ ID NO: 39584 - RNA, 22 nt, Artificial Sequence
  RPE65 RNA guide
gaaacaauguuuguccuauguc

SEQ ID NO: 39585 - RNA, 22 nt, Artificial Sequence
  RPE65 RNA guide
gaaacuuaauguggcucucaug

SEQ ID NO: 39586 - RNA, 22 nt, Artificial Sequence
  RPE65 RNA guide
gaaagcacuugauaaguauuug

SEQ ID NO: 39587 - RNA, 22 nt, Artificial Sequence
  RPE65 RNA guide
gaaagcaucauagacagaggca

SEQ ID NO: 39588 - RNA, 22 nt, Artificial Sequence
  RPE65 RNA guide
gaaaggcagggaccauguuacc

SEQ ID NO: 39589 - RNA, 22 nt, Artificial Sequence
  RPE65 RNA guide
gaacaucaccuagcacuguguc

SEQ ID NO: 39590 - RNA, 22 nt, Artificial Sequence
  RPE65 RNA guide
gaacaugagagccacauuaagu

SEQ ID NO: 39591 - RNA, 22 nt, Artificial Sequence
  RPE65 RNA guide
gaacccauauaaaaugccuaac

SEQ ID NO: 39592 - RNA, 22 nt, Artificial Sequence
  RPE65 RNA guide
gaagaaacaauguuuguccuau

SEQ ID NO: 39593 - RNA, 22 nt, Artificial Sequence
  RPE65 RNA guide
gaauauggaaagcacuugauaa

SEQ ID NO: 39594 - RNA, 22 nt, Artificial Sequence
  RPE65 RNA guide
gaauauguuaggcauuuuauau

SEQ ID NO: 39595 - RNA, 22 nt, Artificial Sequence
  RPE65 RNA guide
gaaucauacauucgcagcauga

SEQ ID NO: 39596 - RNA, 22 nt, Artificial Sequence
  RPE65 RNA guide
gaaugaaugaaugaauauguua

SEQ ID NO: 39597 - RNA, 22 nt, Artificial Sequence
  RPE65 RNA guide
gaaugaccauuccaagcuccaa

SEQ ID NO: 39598 - RNA, 22 nt, Artificial Sequence
  RPE65 RNA guide
gaauggucauucuguguguccu

SEQ ID NO: 39599 - RNA, 22 nt, Artificial Sequence
  RPE65 RNA guide
gaauguaugauucuaacuugau

SEQ ID NO: 39600 - RNA, 22 nt, Artificial Sequence
  RPE65 RNA guide
gaauuuaugcuagaugcaaggg

SEQ ID NO: 39601 - RNA, 22 nt, Artificial Sequence
  RPE65 RNA guide
gacaaacauuguuucuucaucu

SEQ ID NO: 39602 - RNA, 22 nt, Artificial Sequence
  RPE65 RNA guide
gacaaugcuaggauuugaaacu

SEQ ID NO: 39603 - RNA, 22 nt, Artificial Sequence
  RPE65 RNA guide
gacacaaauacuuaucaagugc

SEQ ID NO: 39604 - RNA, 22 nt, Artificial Sequence
  RPE65 RNA guide
gacacacagaaugaccauucca

SEQ ID NO: 39605 - RNA, 22 nt, Artificial Sequence
  RPE65 RNA guide
gacacagugcuaggugauguuc

SEQ ID NO: 39606 - RNA, 22 nt, Artificial Sequence
  RPE65 RNA guide
gacagaggcaaucagugcaguc

SEQ ID NO: 39607 - RNA, 22 nt, Artificial Sequence
  RPE65 RNA guide
gacauaggacaaacauuguuuc

SEQ ID NO: 39608 - RNA, 22 nt, Artificial Sequence
  RPE65 RNA guide
gaccauguuacccuacucauug

SEQ ID NO: 39609 - RNA, 22 nt, Artificial Sequence
  RPE65 RNA guide
gaccauuccaagcuccaaaugg

SEQ ID NO: 39610 - RNA, 22 nt, Artificial Sequence
  RPE65 RNA guide
gacuagcuauuugacauaggac

SEQ ID NO: 39611 - RNA, 22 nt, Artificial Sequence
  RPE65 RNA guide
gacugcacugauugccucuguc

SEQ ID NO: 39612 - RNA, 22 nt, Artificial Sequence
  RPE65 RNA guide
gagaacccauauaaaaugccua

SEQ ID NO: 39613 - RNA, 22 nt, Artificial Sequence
  RPE65 RNA guide
gagagaacccauauaaaaugcc

SEQ ID NO: 39614 - RNA, 22 nt, Artificial Sequence
  RPE65 RNA guide
gagagccacauuaaguuucaaa

SEQ ID NO: 39615 - RNA, 22 nt, Artificial Sequence
  RPE65 RNA guide
gagaugaagaaacaauguuugu

SEQ ID NO: 39616 - RNA, 22 nt, Artificial Sequence
  RPE65 RNA guide
gagcacccaguauuuaccaggu

SEQ ID NO: 39617 - RNA, 22 nt, Artificial Sequence
  RPE65 RNA guide
gagccacauuaaguuucaaauc

SEQ ID NO: 39618 - RNA, 22 nt, Artificial Sequence
  RPE65 RNA guide
gagcuuggaauggucauucugu

SEQ ID NO: 39619 - RNA, 22 nt, Artificial Sequence
  RPE65 RNA guide
gaggacacacagaaugaccauu

SEQ ID NO: 39620 - RNA, 22 nt, Artificial Sequence
  RPE65 RNA guide
gaggcaaucagugcaguccauu

SEQ ID NO: 39621 - RNA, 22 nt, Artificial Sequence
  RPE65 RNA guide
gaguaggguaacauggucccug

SEQ ID NO: 39622 - RNA, 22 nt, Artificial Sequence
  RPE65 RNA guide
gauagaucaaugaguaggguaa

SEQ ID NO: 39623 - RNA, 22 nt, Artificial Sequence
  RPE65 RNA guide
gaucaaugaguaggguaacaug

SEQ ID NO: 39624 - RNA, 22 nt, Artificial Sequence
  RPE65 RNA guide
gaucuaucccuugcaucuagca

SEQ ID NO: 39625 - RNA, 22 nt, Artificial Sequence
  RPE65 RNA guide
gaugaagaaacaauguuugucc

SEQ ID NO: 39626 - RNA, 22 nt, Artificial Sequence
  RPE65 RNA guide
gaugaggacacacagaaugacc

SEQ ID NO: 39627 - RNA, 22 nt, Artificial Sequence
  RPE65 RNA guide
gaugcaagggauagaucaauga

SEQ ID NO: 39628 - RNA, 22 nt, Artificial Sequence
  RPE65 RNA guide
gaugcuuuccugcaauuggugu

SEQ ID NO: 39629 - RNA, 22 nt, Artificial Sequence
  RPE65 RNA guide
gauguucaggaauuuagaauuu

SEQ ID NO: 39630 - RNA, 22 nt, Artificial Sequence
  RPE65 RNA guide
gauucuaacuugaugaggacac

SEQ ID NO: 39631 - RNA, 22 nt, Artificial Sequence
  RPE65 RNA guide
gauugccucugucuaugaugcu

SEQ ID NO: 39632 - RNA, 22 nt, Artificial Sequence
  RPE65 RNA guide
gauuggagagaacccauauaaa

SEQ ID NO: 39633 - RNA, 22 nt, Artificial Sequence
  RPE65 RNA guide
gauuugaaacuuaauguggcuc

SEQ ID NO: 39634 - RNA, 22 nt, Artificial Sequence
  RPE65 RNA guide
gcaagggauagaucaaugagua

SEQ ID NO: 39635 - RNA, 22 nt, Artificial Sequence
  RPE65 RNA guide
gcaaucagugcaguccauuugg

SEQ ID NO: 39636 - RNA, 22 nt, Artificial Sequence
  RPE65 RNA guide
gcaauugguguaauuuggugaa

SEQ ID NO: 39637 - RNA, 22 nt, Artificial Sequence
  RPE65 RNA guide
gcacccaguauuuaccagguuc

SEQ ID NO: 39638 - RNA, 22 nt, Artificial Sequence
  RPE65 RNA guide
gcacugauugccucugucuaug

SEQ ID NO: 39639 - RNA, 22 nt, Artificial Sequence
  RPE65 RNA guide
gcacuugauaaguauuuguguc

SEQ ID NO: 39640 - RNA, 22 nt, Artificial Sequence
  RPE65 RNA guide
gcaggaaagcaucauagacaga

SEQ ID NO: 39641 - RNA, 22 nt, Artificial Sequence
  RPE65 RNA guide
gcagggaccauguuacccuacu

SEQ ID NO: 39642 - RNA, 22 nt, Artificial Sequence
  RPE65 RNA guide
gcaguccauuuggagcuuggaa

SEQ ID NO: 39643 - RNA, 22 nt, Artificial Sequence
  RPE65 RNA guide
gcauaaauucugaauauggaaa

SEQ ID NO: 39644 - RNA, 22 nt, Artificial Sequence
  RPE65 RNA guide
gcaucauagacagaggcaauca

SEQ ID NO: 39645 - RNA, 22 nt, Artificial Sequence
  RPE65 RNA guide
gcaucuagcauaaauucugaau

SEQ ID NO: 39646 - RNA, 22 nt, Artificial Sequence
  RPE65 RNA guide
gcaugaaccugguaaauacugg

SEQ ID NO: 39647 - RNA, 22 nt, Artificial Sequence
  RPE65 RNA guide
gcauugucaacaaugacuagcu

SEQ ID NO: 39648 - RNA, 22 nt, Artificial Sequence
  RPE65 RNA guide
gcauuuuauauggguucucucc

SEQ ID NO: 39649 - RNA, 22 nt, Artificial Sequence
  RPE65 RNA guide
gccacauuaaguuucaaauccu

SEQ ID NO: 39650 - RNA, 22 nt, Artificial Sequence
  RPE65 RNA guide
gccuaacauauucauucauuca

SEQ ID NO: 39651 - RNA, 22 nt, Artificial Sequence
  RPE65 RNA guide
gccucugucuaugaugcuuucc

SEQ ID NO: 39652 - RNA, 22 nt, Artificial Sequence
  RPE65 RNA guide
gccuuucauagcuuuuauaagc

SEQ ID NO: 39653 - RNA, 22 nt, Artificial Sequence
  RPE65 RNA guide
gcgaauguaugauucuaacuug

SEQ ID NO: 39654 - RNA, 22 nt, Artificial Sequence
  RPE65 RNA guide
gcuagaugcaagggauagauca

SEQ ID NO: 39655 - RNA, 22 nt, Artificial Sequence
  RPE65 RNA guide
gcuagcaugaaccugguaaaua

SEQ ID NO: 39656 - RNA, 22 nt, Artificial Sequence
  RPE65 RNA guide
gcuagcuuauaaaagcuaugaa

SEQ ID NO: 39657 - RNA, 22 nt, Artificial Sequence
  RPE65 RNA guide
gcuaggauuugaaacuuaaugu

SEQ ID NO: 39658 - RNA, 22 nt, Artificial Sequence
  RPE65 RNA guide
gcuaggugauguucaggaauuu

SEQ ID NO: 39659 - RNA, 22 nt, Artificial Sequence
  RPE65 RNA guide
gcuagucauuguugacaaugcu

SEQ ID NO: 39660 - RNA, 22 nt, Artificial Sequence
  RPE65 RNA guide
gcuaugaaaggcagggaccaug

SEQ ID NO: 39661 - RNA, 22 nt, Artificial Sequence
  RPE65 RNA guide
gcuauuugacauaggacaaaca

SEQ ID NO: 39662 - RNA, 22 nt, Artificial Sequence
  RPE65 RNA guide
gcuccaaauggacugcacugau

SEQ ID NO: 39663 - RNA, 22 nt, Artificial Sequence
  RPE65 RNA guide
gcucucauguucuuuucaccaa

SEQ ID NO: 39664 - RNA, 22 nt, Artificial Sequence
  RPE65 RNA guide
gcugcgaauguaugauucuaac

SEQ ID NO: 39665 - RNA, 22 nt, Artificial Sequence
  RPE65 RNA guide
gcuuauaaaagcuaugaaaggc

SEQ ID NO: 39666 - RNA, 22 nt, Artificial Sequence
  RPE65 RNA guide
gcuuggaauggucauucugugu

SEQ ID NO: 39667 - RNA, 22 nt, Artificial Sequence
  RPE65 RNA guide
gcuuuccauauucagaauuuau

SEQ ID NO: 39668 - RNA, 22 nt, Artificial Sequence
  RPE65 RNA guide
gcuuuccugcaauugguguaau

SEQ ID NO: 39669 - RNA, 22 nt, Artificial Sequence
  RPE65 RNA guide
gcuuuuauaagcuagcaugaac

SEQ ID NO: 39670 - RNA, 22 nt, Artificial Sequence
  RPE65 RNA guide
ggaaagcacuugauaaguauuu

SEQ ID NO: 39671 - RNA, 22 nt, Artificial Sequence
  RPE65 RNA guide
ggaaagcaucauagacagaggc

SEQ ID NO: 39672 - RNA, 22 nt, Artificial Sequence
  RPE65 RNA guide
ggaauggucauucugugugucc

SEQ ID NO: 39673 - RNA, 22 nt, Artificial Sequence
  RPE65 RNA guide
ggacaaacauuguuucuucauc

SEQ ID NO: 39674 - RNA, 22 nt, Artificial Sequence
  RPE65 RNA guide
ggacacacagaaugaccauucc

SEQ ID NO: 39675 - RNA, 22 nt, Artificial Sequence
  RPE65 RNA guide
ggacacagugcuaggugauguu

SEQ ID NO: 39676 - RNA, 22 nt, Artificial Sequence
  RPE65 RNA guide
ggaccauguuacccuacucauu

SEQ ID NO: 39677 - RNA, 22 nt, Artificial Sequence
  RPE65 RNA guide
ggacugcacugauugccucugu

SEQ ID NO: 39678 - RNA, 22 nt, Artificial Sequence
  RPE65 RNA guide
ggagagaacccauauaaaaugc

SEQ ID NO: 39679 - RNA, 22 nt, Artificial Sequence
  RPE65 RNA guide
ggagcuuggaauggucauucug

SEQ ID NO: 39680 - RNA, 22 nt, Artificial Sequence
  RPE65 RNA guide
ggauagaucaaugaguagggua

SEQ ID NO: 39681 - RNA, 22 nt, Artificial Sequence
  RPE65 RNA guide
ggauuggagagaacccauauaa

SEQ ID NO: 39682 - RNA, 22 nt, Artificial Sequence
  RPE65 RNA guide
ggauuugaaacuuaauguggcu

SEQ ID NO: 39683 - RNA, 22 nt, Artificial Sequence
  RPE65 RNA guide
ggcaaucagugcaguccauuug

SEQ ID NO: 39684 - RNA, 22 nt, Artificial Sequence
  RPE65 RNA guide
ggcagggaccauguuacccuac

SEQ ID NO: 39685 - RNA, 22 nt, Artificial Sequence
  RPE65 RNA guide
ggcauuuuauauggguucucuc

SEQ ID NO: 39686 - RNA, 22 nt, Artificial Sequence
  RPE65 RNA guide
ggcucucauguucuuuucacca

SEQ ID NO: 39687 - RNA, 22 nt, Artificial Sequence
  RPE65 RNA guide
gggacacagugcuaggugaugu

SEQ ID NO: 39688 - RNA, 22 nt, Artificial Sequence
  RPE65 RNA guide
gggaccauguuacccuacucau

SEQ ID NO: 39689 - RNA, 22 nt, Artificial Sequence
  RPE65 RNA guide
gggauagaucaaugaguagggu

SEQ ID NO: 39690 - RNA, 22 nt, Artificial Sequence
  RPE65 RNA guide
ggguaacauggucccugccuuu

SEQ ID NO: 39691 - RNA, 22 nt, Artificial Sequence
  RPE65 RNA guide
ggguucucuccaauccauguaa

SEQ ID NO: 39692 - RNA, 22 nt, Artificial Sequence
  RPE65 RNA guide
gguaacauggucccugccuuuc

SEQ ID NO: 39693 - RNA, 22 nt, Artificial Sequence
  RPE65 RNA guide
ggucauucuguguguccucauc

SEQ ID NO: 39694 - RNA, 22 nt, Artificial Sequence
  RPE65 RNA guide
ggucccugccuuucauagcuuu

SEQ ID NO: 39695 - RNA, 22 nt, Artificial Sequence
  RPE65 RNA guide
ggugaaaagaacaugagagcca

SEQ ID NO: 39696 - RNA, 22 nt, Artificial Sequence
  RPE65 RNA guide
ggugauguucaggaauuuagaa

SEQ ID NO: 39697 - RNA, 22 nt, Artificial Sequence
  RPE65 RNA guide
gguguaauuuggugaaaagaac

SEQ ID NO: 39698 - RNA, 22 nt, Artificial Sequence
  RPE65 RNA guide
gguucaugcuagcuuauaaaag

SEQ ID NO: 39699 - RNA, 22 nt, Artificial Sequence
  RPE65 RNA guide
gguucucuccaauccauguaag

SEQ ID NO: 39700 - RNA, 22 nt, Artificial Sequence
  RPE65 RNA guide
guaacauggucccugccuuuca

SEQ ID NO: 39701 - RNA, 22 nt, Artificial Sequence
  RPE65 RNA guide
guaauuuggugaaaagaacaug

SEQ ID NO: 39702 - RNA, 22 nt, Artificial Sequence
  RPE65 RNA guide
guaggguaacauggucccugcc

SEQ ID NO: 39703 - RNA, 22 nt, Artificial Sequence
  RPE65 RNA guide
guaugauucuaacuugaugagg

SEQ ID NO: 39704 - RNA, 22 nt, Artificial Sequence
  RPE65 RNA guide
guauuuaccagguucaugcuag

SEQ ID NO: 39705 - RNA, 22 nt, Artificial Sequence
  RPE65 RNA guide
guauuugugucaugaaugaaug

SEQ ID NO: 39706 - RNA, 22 nt, Artificial Sequence
  RPE65 RNA guide
gucaaauagcuagucauuguug

SEQ ID NO: 39707 - RNA, 22 nt, Artificial Sequence
  RPE65 RNA guide
gucaacaaugacuagcuauuug

SEQ ID NO: 39708 - RNA, 22 nt, Artificial Sequence
  RPE65 RNA guide
gucauucuguguguccucauca

SEQ ID NO: 39709 - RNA, 22 nt, Artificial Sequence
  RPE65 RNA guide
gucauuguugacaaugcuagga

SEQ ID NO: 39710 - RNA, 22 nt, Artificial Sequence
  RPE65 RNA guide
guccauuuggagcuuggaaugg

SEQ ID NO: 39711 - RNA, 22 nt, Artificial Sequence
  RPE65 RNA guide
gucccugccuuucauagcuuuu

SEQ ID NO: 39712 - RNA, 22 nt, Artificial Sequence
  RPE65 RNA guide
guccuaugucaaauagcuaguc

SEQ ID NO: 39713 - RNA, 22 nt, Artificial Sequence
  RPE65 RNA guide
guccucaucaaguuagaaucau

SEQ ID NO: 39714 - RNA, 22 nt, Artificial Sequence
  RPE65 RNA guide
gucuaugaugcuuuccugcaau

SEQ ID NO: 39715 - RNA, 22 nt, Artificial Sequence
  RPE65 RNA guide
gugaaaagaacaugagagccac

SEQ ID NO: 39716 - RNA, 22 nt, Artificial Sequence
  RPE65 RNA guide
gugauguucaggaauuuagaau

SEQ ID NO: 39717 - RNA, 22 nt, Artificial Sequence
  RPE65 RNA guide
gugcaguccauuuggagcuugg

SEQ ID NO: 39718 - RNA, 22 nt, Artificial Sequence
  RPE65 RNA guide
gugcuaggugauguucaggaau

SEQ ID NO: 39719 - RNA, 22 nt, Artificial Sequence
  RPE65 RNA guide
gugcuuuccauauucagaauuu

SEQ ID NO: 39720 - RNA, 22 nt, Artificial Sequence
  RPE65 RNA guide
guggcucucauguucuuuucac

SEQ ID NO: 39721 - RNA, 22 nt, Artificial Sequence
  RPE65 RNA guide
gugggacacagugcuaggugau

SEQ ID NO: 39722 - RNA, 22 nt, Artificial Sequence
  RPE65 RNA guide
guguaauuuggugaaaagaaca

SEQ ID NO: 39723 - RNA, 22 nt, Artificial Sequence
  RPE65 RNA guide
gugucaugaaugaaugaaugaa

SEQ ID NO: 39724 - RNA, 22 nt, Artificial Sequence
  RPE65 RNA guide
guguccucaucaaguuagaauc

SEQ ID NO: 39725 - RNA, 22 nt, Artificial Sequence
  RPE65 RNA guide
guguguccucaucaaguuagaa

SEQ ID NO: 39726 - RNA, 22 nt, Artificial Sequence
  RPE65 RNA guide
guuacccuacucauugaucuau

SEQ ID NO: 39727 - RNA, 22 nt, Artificial Sequence
  RPE65 RNA guide
guuagaaucauacauucgcagc

SEQ ID NO: 39728 - RNA, 22 nt, Artificial Sequence
  RPE65 RNA guide
guuaggcauuuuauauggguuc

SEQ ID NO: 39729 - RNA, 22 nt, Artificial Sequence
  RPE65 RNA guide
guucaggaauuuagaauuugga

SEQ ID NO: 39730 - RNA, 22 nt, Artificial Sequence
  RPE65 RNA guide
guucaugcuagcuuauaaaagc

SEQ ID NO: 39731 - RNA, 22 nt, Artificial Sequence
  RPE65 RNA guide
guuccaaauucuaaauuccuga

SEQ ID NO: 39732 - RNA, 22 nt, Artificial Sequence
  RPE65 RNA guide
guucucuccaauccauguaagu

SEQ ID NO: 39733 - RNA, 22 nt, Artificial Sequence
  RPE65 RNA guide
guucuuuucaccaaauuacacc

SEQ ID NO: 39734 - RNA, 22 nt, Artificial Sequence
  RPE65 RNA guide
guugacaaugcuaggauuugaa

SEQ ID NO: 39735 - RNA, 22 nt, Artificial Sequence
  RPE65 RNA guide
guuucaaauccuagcauuguca

SEQ ID NO: 39736 - RNA, 22 nt, Artificial Sequence
  RPE65 RNA guide
guuuguccuaugucaaauagcu

SEQ ID NO: 39737 - RNA, 22 nt, Artificial Sequence
  RPE65 RNA guide
uaaaagcuaugaaaggcaggga

SEQ ID NO: 39738 - RNA, 22 nt, Artificial Sequence
  RPE65 RNA guide
uaaacacuuacauggauuggag

SEQ ID NO: 39739 - RNA, 22 nt, Artificial Sequence
  RPE65 RNA guide
uaaauuauucaugcugcgaaug

SEQ ID NO: 39740 - RNA, 22 nt, Artificial Sequence
  RPE65 RNA guide
uaaauuccugaacaucaccuag

SEQ ID NO: 39741 - RNA, 22 nt, Artificial Sequence
  RPE65 RNA guide
uaaauucugaauauggaaagca

SEQ ID NO: 39742 - RNA, 22 nt, Artificial Sequence
  RPE65 RNA guide
uaacauggucccugccuuucau

SEQ ID NO: 39743 - RNA, 22 nt, Artificial Sequence
  RPE65 RNA guide
uaacuugaugaggacacacaga

SEQ ID NO: 39744 - RNA, 22 nt, Artificial Sequence
  RPE65 RNA guide
uaagcuagcaugaaccugguaa

SEQ ID NO: 39745 - RNA, 22 nt, Artificial Sequence
  RPE65 RNA guide
uaaguuucaaauccuagcauug

SEQ ID NO: 39746 - RNA, 22 nt, Artificial Sequence
  RPE65 RNA guide
uaauguggcucucauguucuuu

SEQ ID NO: 39747 - RNA, 22 nt, Artificial Sequence
  RPE65 RNA guide
uaauuuggugaaaagaacauga

SEQ ID NO: 39748 - RNA, 22 nt, Artificial Sequence
  RPE65 RNA guide
uacaccaauugcaggaaagcau

SEQ ID NO: 39749 - RNA, 22 nt, Artificial Sequence
  RPE65 RNA guide
uacauggauuggagagaaccca

SEQ ID NO: 39750 - RNA, 22 nt, Artificial Sequence
  RPE65 RNA guide
uacauucgcagcaugaauaauu

SEQ ID NO: 39751 - RNA, 22 nt, Artificial Sequence
  RPE65 RNA guide
uaccagguucaugcuagcuuau

SEQ ID NO: 39752 - RNA, 22 nt, Artificial Sequence
  RPE65 RNA guide
uacccuacucauugaucuaucc

SEQ ID NO: 39753 - RNA, 22 nt, Artificial Sequence
  RPE65 RNA guide
uacucauugaucuaucccuugc

SEQ ID NO: 39754 - RNA, 22 nt, Artificial Sequence
  RPE65 RNA guide
uacuuaucaagugcuuuccaua

SEQ ID NO: 39755 - RNA, 22 nt, Artificial Sequence
  RPE65 RNA guide
uagaaucauacauucgcagcau

SEQ ID NO: 39756 - RNA, 22 nt, Artificial Sequence
  RPE65 RNA guide
uagacagaggcaaucagugcag

SEQ ID NO: 39757 - RNA, 22 nt, Artificial Sequence
  RPE65 RNA guide
uagagaugaagaaacaauguuu

SEQ ID NO: 39758 - RNA, 22 nt, Artificial Sequence
  RPE65 RNA guide
uagaucaaugaguaggguaaca

SEQ ID NO: 39759 - RNA, 22 nt, Artificial Sequence
  RPE65 RNA guide
uagaugcaagggauagaucaau

SEQ ID NO: 39760 - RNA, 22 nt, Artificial Sequence
  RPE65 RNA guide
uagcauaaauucugaauaugga

SEQ ID NO: 39761 - RNA, 22 nt, Artificial Sequence
  RPE65 RNA guide
uagcaugaaccugguaaauacu

SEQ ID NO: 39762 - RNA, 22 nt, Artificial Sequence
  RPE65 RNA guide
uagcauugucaacaaugacuag

SEQ ID NO: 39763 - RNA, 22 nt, Artificial Sequence
  RPE65 RNA guide
uagcuagucauuguugacaaug

SEQ ID NO: 39764 - RNA, 22 nt, Artificial Sequence
  RPE65 RNA guide
uagcuauuugacauaggacaaa

SEQ ID NO: 39765 - RNA, 22 nt, Artificial Sequence
  RPE65 RNA guide
uagcuuauaaaagcuaugaaag

SEQ ID NO: 39766 - RNA, 22 nt, Artificial Sequence
  RPE65 RNA guide
uagcuuuuauaagcuagcauga

SEQ ID NO: 39767 - RNA, 22 nt, Artificial Sequence
  RPE65 RNA guide
uaggacaaacauuguuucuuca

SEQ ID NO: 39768 - RNA, 22 nt, Artificial Sequence
  RPE65 RNA guide
uaggauuugaaacuuaaugugg

SEQ ID NO: 39769 - RNA, 22 nt, Artificial Sequence
  RPE65 RNA guide
uaggcauuuuauauggguucuc

SEQ ID NO: 39770 - RNA, 22 nt, Artificial Sequence
  RPE65 RNA guide
uaggguaacauggucccugccu

SEQ ID NO: 39771 - RNA, 22 nt, Artificial Sequence
  RPE65 RNA guide
uaggugauguucaggaauuuag

SEQ ID NO: 39772 - RNA, 22 nt, Artificial Sequence
  RPE65 RNA guide
uagucauuguugacaaugcuag

SEQ ID NO: 39773 - RNA, 22 nt, Artificial Sequence
  RPE65 RNA guide
uauaaaagcuaugaaaggcagg

SEQ ID NO: 39774 - RNA, 22 nt, Artificial Sequence
  RPE65 RNA guide
uauaagcuagcaugaaccuggu

SEQ ID NO: 39775 - RNA, 22 nt, Artificial Sequence
  RPE65 RNA guide
uauauggguucucuccaaucca

SEQ ID NO: 39776 - RNA, 22 nt, Artificial Sequence
  RPE65 RNA guide
uaucaagugcuuuccauauuca

SEQ ID NO: 39777 - RNA, 22 nt, Artificial Sequence
  RPE65 RNA guide
uaucccuugcaucuagcauaaa

SEQ ID NO: 39778 - RNA, 22 nt, Artificial Sequence
  RPE65 RNA guide
uaugaaaggcagggaccauguu

SEQ ID NO: 39779 - RNA, 22 nt, Artificial Sequence
  RPE65 RNA guide
uaugaugcuuuccugcaauugg

SEQ ID NO: 39780 - RNA, 22 nt, Artificial Sequence
  RPE65 RNA guide
uaugauucuaacuugaugagga

SEQ ID NO: 39781 - RNA, 22 nt, Artificial Sequence
  RPE65 RNA guide
uaugcuagaugcaagggauaga

SEQ ID NO: 39782 - RNA, 22 nt, Artificial Sequence
  RPE65 RNA guide
uauggaaagcacuugauaagua

SEQ ID NO: 39783 - RNA, 22 nt, Artificial Sequence
  RPE65 RNA guide
uauggguucucuccaauccaug

SEQ ID NO: 39784 - RNA, 22 nt, Artificial Sequence
  RPE65 RNA guide
uaugucaaauagcuagucauug

SEQ ID NO: 39785 - RNA, 22 nt, Artificial Sequence
  RPE65 RNA guide
uauguuaggcauuuuauauggg

SEQ ID NO: 39786 - RNA, 22 nt, Artificial Sequence
  RPE65 RNA guide
uauucagaauuuaugcuagaug

SEQ ID NO: 39787 - RNA, 22 nt, Artificial Sequence
  RPE65 RNA guide
uauucaugcugcgaauguauga

SEQ ID NO: 39788 - RNA, 22 nt, Artificial Sequence
  RPE65 RNA guide
uauuuaccagguucaugcuagc

SEQ ID NO: 39789 - RNA, 22 nt, Artificial Sequence
  RPE65 RNA guide
ucaaauagcuagucauuguuga

SEQ ID NO: 39790 - RNA, 22 nt, Artificial Sequence
  RPE65 RNA guide
ucaaauccuagcauugucaaca

SEQ ID NO: 39791 - RNA, 22 nt, Artificial Sequence
  RPE65 RNA guide
ucaacaaugacuagcuauuuga

SEQ ID NO: 39792 - RNA, 22 nt, Artificial Sequence
  RPE65 RNA guide
ucaacauaaauuauucaugcug

SEQ ID NO: 39793 - RNA, 22 nt, Artificial Sequence
  RPE65 RNA guide
ucaagugcuuuccauauucaga

SEQ ID NO: 39794 - RNA, 22 nt, Artificial Sequence
  RPE65 RNA guide
ucaaguuagaaucauacauucg

SEQ ID NO: 39795 - RNA, 22 nt, Artificial Sequence
  RPE65 RNA guide
ucaaugaguaggguaacauggu

SEQ ID NO: 39796 - RNA, 22 nt, Artificial Sequence
  RPE65 RNA guide
ucaccaaauuacaccaauugca

SEQ ID NO: 39797 - RNA, 22 nt, Artificial Sequence
  RPE65 RNA guide
ucagaauuuaugcuagaugcaa

SEQ ID NO: 39798 - RNA, 22 nt, Artificial Sequence
  RPE65 RNA guide
ucagugcaguccauuuggagcu

SEQ ID NO: 39799 - RNA, 22 nt, Artificial Sequence
  RPE65 RNA guide
ucauacauucgcagcaugaaua

SEQ ID NO: 39800 - RNA, 22 nt, Artificial Sequence
  RPE65 RNA guide
ucauagacagaggcaaucagug

SEQ ID NO: 39801 - RNA, 22 nt, Artificial Sequence
  RPE65 RNA guide
ucauagcuuuuauaagcuagca

SEQ ID NO: 39802 - RNA, 22 nt, Artificial Sequence
  RPE65 RNA guide
ucaucaaguuagaaucauacau

SEQ ID NO: 39803 - RNA, 22 nt, Artificial Sequence
  RPE65 RNA guide
ucaugacacaaauacuuaucaa

SEQ ID NO: 39804 - RNA, 22 nt, Artificial Sequence
  RPE65 RNA guide
ucaugcuagcuuauaaaagcua

SEQ ID NO: 39805 - RNA, 22 nt, Artificial Sequence
  RPE65 RNA guide
ucaugcugcgaauguaugauuc

SEQ ID NO: 39806 - RNA, 22 nt, Artificial Sequence
  RPE65 RNA guide
ucauguucuuuucaccaaauua

SEQ ID NO: 39807 - RNA, 22 nt, Artificial Sequence
  RPE65 RNA guide
ucauucuguguguccucaucaa

SEQ ID NO: 39808 - RNA, 22 nt, Artificial Sequence
  RPE65 RNA guide
ucauugaucuaucccuugcauc

SEQ ID NO: 39809 - RNA, 22 nt, Artificial Sequence
  RPE65 RNA guide
ucauuguugacaaugcuaggau

SEQ ID NO: 39810 - RNA, 22 nt, Artificial Sequence
  RPE65 RNA guide
uccaaauggacugcacugauug

SEQ ID NO: 39811 - RNA, 22 nt, Artificial Sequence
  RPE65 RNA guide
uccaaauucuaaauuccugaac

SEQ ID NO: 39812 - RNA, 22 nt, Artificial Sequence
  RPE65 RNA guide
uccaagcuccaaauggacugca

SEQ ID NO: 39813 - RNA, 22 nt, Artificial Sequence
  RPE65 RNA guide
uccauauucagaauuuaugcua

SEQ ID NO: 39814 - RNA, 22 nt, Artificial Sequence
  RPE65 RNA guide
uccauuuggagcuuggaauggu

SEQ ID NO: 39815 - RNA, 22 nt, Artificial Sequence
  RPE65 RNA guide
ucccugccuuucauagcuuuua

SEQ ID NO: 39816 - RNA, 22 nt, Artificial Sequence
  RPE65 RNA guide
ucccuugcaucuagcauaaauu

SEQ ID NO: 39817 - RNA, 22 nt, Artificial Sequence
  RPE65 RNA guide
uccuagcauugucaacaaugac

SEQ ID NO: 39818 - RNA, 22 nt, Artificial Sequence
  RPE65 RNA guide
uccuaugucaaauagcuaguca

SEQ ID NO: 39819 - RNA, 22 nt, Artificial Sequence
  RPE65 RNA guide
uccucaucaaguuagaaucaua

SEQ ID NO: 39820 - RNA, 22 nt, Artificial Sequence
  RPE65 RNA guide
uccugaacaucaccuagcacug

SEQ ID NO: 39821 - RNA, 22 nt, Artificial Sequence
  RPE65 RNA guide
uccugcaauugguguaauuugg

SEQ ID NO: 39822 - RNA, 22 nt, Artificial Sequence
  RPE65 RNA guide
ucgcagcaugaauaauuuaugu

SEQ ID NO: 39823 - RNA, 22 nt, Artificial Sequence
  RPE65 RNA guide
ucuaaauuccugaacaucaccu

SEQ ID NO: 39824 - RNA, 22 nt, Artificial Sequence
  RPE65 RNA guide
ucuaacuugaugaggacacaca

SEQ ID NO: 39825 - RNA, 22 nt, Artificial Sequence
  RPE65 RNA guide
ucuaucccuugcaucuagcaua

SEQ ID NO: 39826 - RNA, 22 nt, Artificial Sequence
  RPE65 RNA guide
ucuaugaugcuuuccugcaauu

SEQ ID NO: 39827 - RNA, 22 nt, Artificial Sequence
  RPE65 RNA guide
ucucauguucuuuucaccaaau

SEQ ID NO: 39828 - RNA, 22 nt, Artificial Sequence
  RPE65 RNA guide
ucuccaauccauguaaguguuu

SEQ ID NO: 39829 - RNA, 22 nt, Artificial Sequence
  RPE65 RNA guide
ucucuccaauccauguaagugu

SEQ ID NO: 39830 - RNA, 22 nt, Artificial Sequence
  RPE65 RNA guide
ucugaauauggaaagcacuuga

SEQ ID NO: 39831 - RNA, 22 nt, Artificial Sequence
  RPE65 RNA guide
ucugucuaugaugcuuuccugc

SEQ ID NO: 39832 - RNA, 22 nt, Artificial Sequence
  RPE65 RNA guide
ucuguguguccucaucaaguua

SEQ ID NO: 39833 - RNA, 22 nt, Artificial Sequence
  RPE65 RNA guide
ucuuuucaccaaauuacaccaa

SEQ ID NO: 39834 - RNA, 22 nt, Artificial Sequence
  RPE65 RNA guide
ugaaaagaacaugagagccaca

SEQ ID NO: 39835 - RNA, 22 nt, Artificial Sequence
  RPE65 RNA guide
ugaaacuuaauguggcucucau

SEQ ID NO: 39836 - RNA, 22 nt, Artificial Sequence
  RPE65 RNA guide
ugaaaggcagggaccauguuac

SEQ ID NO: 39837 - RNA, 22 nt, Artificial Sequence
  RPE65 RNA guide
ugaacaucaccuagcacugugu

SEQ ID NO: 39838 - RNA, 22 nt, Artificial Sequence
  RPE65 RNA guide
ugaaccugguaaauacugggug

SEQ ID NO: 39839 - RNA, 22 nt, Artificial Sequence
  RPE65 RNA guide
ugaagaaacaauguuuguccua

SEQ ID NO: 39840 - RNA, 22 nt, Artificial Sequence
  RPE65 RNA guide
ugaauauggaaagcacuugaua

SEQ ID NO: 39841 - RNA, 22 nt, Artificial Sequence
  RPE65 RNA guide
ugaauauguuaggcauuuuaua

SEQ ID NO: 39842 - RNA, 22 nt, Artificial Sequence
  RPE65 RNA guide
ugaaugaaugaaugaauauguu

SEQ ID NO: 39843 - RNA, 22 nt, Artificial Sequence
  RPE65 RNA guide
ugacaaugcuaggauuugaaac

SEQ ID NO: 39844 - RNA, 22 nt, Artificial Sequence
  RPE65 RNA guide
ugacacaaauacuuaucaagug

SEQ ID NO: 39845 - RNA, 22 nt, Artificial Sequence
  RPE65 RNA guide
ugacauaggacaaacauuguuu

SEQ ID NO: 39846 - RNA, 22 nt, Artificial Sequence
  RPE65 RNA guide
ugaccauuccaagcuccaaaug

SEQ ID NO: 39847 - RNA, 22 nt, Artificial Sequence
  RPE65 RNA guide
ugacuagcuauuugacauagga

SEQ ID NO: 39848 - RNA, 22 nt, Artificial Sequence
  RPE65 RNA guide
ugagagccacauuaaguuucaa

SEQ ID NO: 39849 - RNA, 22 nt, Artificial Sequence
  RPE65 RNA guide
ugagcacccaguauuuaccagg

SEQ ID NO: 39850 - RNA, 22 nt, Artificial Sequence
  RPE65 RNA guide
ugaggacacacagaaugaccau

SEQ ID NO: 39851 - RNA, 22 nt, Artificial Sequence
  RPE65 RNA guide
ugaguaggguaacauggucccu

SEQ ID NO: 39852 - RNA, 22 nt, Artificial Sequence
  RPE65 RNA guide
ugaucuaucccuugcaucuagc

SEQ ID NO: 39853 - RNA, 22 nt, Artificial Sequence
  RPE65 RNA guide
ugaugaggacacacagaaugac

SEQ ID NO: 39854 - RNA, 22 nt, Artificial Sequence
  RPE65 RNA guide
ugaugcuuuccugcaauuggug

SEQ ID NO: 39855 - RNA, 22 nt, Artificial Sequence
  RPE65 RNA guide
ugauguucaggaauuuagaauu

SEQ ID NO: 39856 - RNA, 22 nt, Artificial Sequence
  RPE65 RNA guide
ugauucuaacuugaugaggaca

SEQ ID NO: 39857 - RNA, 22 nt, Artificial Sequence
  RPE65 RNA guide
ugauugccucugucuaugaugc

SEQ ID NO: 39858 - RNA, 22 nt, Artificial Sequence
  RPE65 RNA guide
ugcaagggauagaucaaugagu

SEQ ID NO: 39859 - RNA, 22 nt, Artificial Sequence
  RPE65 RNA guide
ugcaauugguguaauuugguga

SEQ ID NO: 39860 - RNA, 22 nt, Artificial Sequence
  RPE65 RNA guide
ugcacugauugccucugucuau

SEQ ID NO: 39861 - RNA, 22 nt, Artificial Sequence
  RPE65 RNA guide
ugcaggaaagcaucauagacag

SEQ ID NO: 39862 - RNA, 22 nt, Artificial Sequence
  RPE65 RNA guide
ugcaguccauuuggagcuugga

SEQ ID NO: 39863 - RNA, 22 nt, Artificial Sequence
  RPE65 RNA guide
ugcaucuagcauaaauucugaa

SEQ ID NO: 39864 - RNA, 22 nt, Artificial Sequence
  RPE65 RNA guide
ugccuaacauauucauucauuc

SEQ ID NO: 39865 - RNA, 22 nt, Artificial Sequence
  RPE65 RNA guide
ugccucugucuaugaugcuuuc

SEQ ID NO: 39866 - RNA, 22 nt, Artificial Sequence
  RPE65 RNA guide
ugccuuucauagcuuuuauaag

SEQ ID NO: 39867 - RNA, 22 nt, Artificial Sequence
  RPE65 RNA guide
ugcgaauguaugauucuaacuu

SEQ ID NO: 39868 - RNA, 22 nt, Artificial Sequence
  RPE65 RNA guide
ugcuagaugcaagggauagauc

SEQ ID NO: 39869 - RNA, 22 nt, Artificial Sequence
  RPE65 RNA guide
ugcuagcuuauaaaagcuauga

SEQ ID NO: 39870 - RNA, 22 nt, Artificial Sequence
  RPE65 RNA guide
ugcuaggauuugaaacuuaaug

SEQ ID NO: 39871 - RNA, 22 nt, Artificial Sequence
  RPE65 RNA guide
ugcuaggugauguucaggaauu

SEQ ID NO: 39872 - RNA, 22 nt, Artificial Sequence
  RPE65 RNA guide
ugcugcgaauguaugauucuaa

SEQ ID NO: 39873 - RNA, 22 nt, Artificial Sequence
  RPE65 RNA guide
ugcuuuccauauucagaauuua

SEQ ID NO: 39874 - RNA, 22 nt, Artificial Sequence
  RPE65 RNA guide
ugcuuuccugcaauugguguaa

SEQ ID NO: 39875 - RNA, 22 nt, Artificial Sequence
  RPE65 RNA guide
uggaaagcacuugauaaguauu

SEQ ID NO: 39876 - RNA, 22 nt, Artificial Sequence
  RPE65 RNA guide
uggaauggucauucuguguguc

SEQ ID NO: 39877 - RNA, 22 nt, Artificial Sequence
  RPE65 RNA guide
uggacugcacugauugccucug

SEQ ID NO: 39878 - RNA, 22 nt, Artificial Sequence
  RPE65 RNA guide
uggagagaacccauauaaaaug

SEQ ID NO: 39879 - RNA, 22 nt, Artificial Sequence
  RPE65 RNA guide
uggagcuuggaauggucauucu

SEQ ID NO: 39880 - RNA, 22 nt, Artificial Sequence
  RPE65 RNA guide
uggauuggagagaacccauaua

SEQ ID NO: 39881 - RNA, 22 nt, Artificial Sequence
  RPE65 RNA guide
uggcucucauguucuuuucacc

SEQ ID NO: 39882 - RNA, 22 nt, Artificial Sequence
  RPE65 RNA guide
ugggacacagugcuaggugaug

SEQ ID NO: 39883 - RNA, 22 nt, Artificial Sequence
  RPE65 RNA guide
uggguucucuccaauccaugua

SEQ ID NO: 39884 - RNA, 22 nt, Artificial Sequence
  RPE65 RNA guide
uggucauucuguguguccucau

SEQ ID NO: 39885 - RNA, 22 nt, Artificial Sequence
  RPE65 RNA guide
uggucccugccuuucauagcuu

SEQ ID NO: 39886 - RNA, 22 nt, Artificial Sequence
  RPE65 RNA guide
uggugaaaagaacaugagagcc

SEQ ID NO: 39887 - RNA, 22 nt, Artificial Sequence
  RPE65 RNA guide
ugguguaauuuggugaaaagaa

SEQ ID NO: 39888 - RNA, 22 nt, Artificial Sequence
  RPE65 RNA guide
uguaauuuggugaaaagaacau

SEQ ID NO: 39889 - RNA, 22 nt, Artificial Sequence
  RPE65 RNA guide
uguaugauucuaacuugaugag

SEQ ID NO: 39890 - RNA, 22 nt, Artificial Sequence
  RPE65 RNA guide
ugucaaauagcuagucauuguu

SEQ ID NO: 39891 - RNA, 22 nt, Artificial Sequence
  RPE65 RNA guide
ugucaacaaugacuagcuauuu

SEQ ID NO: 39892 - RNA, 22 nt, Artificial Sequence
  RPE65 RNA guide
uguccuaugucaaauagcuagu

SEQ ID NO: 39893 - RNA, 22 nt, Artificial Sequence
  RPE65 RNA guide
uguccucaucaaguuagaauca

SEQ ID NO: 39894 - RNA, 22 nt, Artificial Sequence
  RPE65 RNA guide
ugucuaugaugcuuuccugcaa

SEQ ID NO: 39895 - RNA, 22 nt, Artificial Sequence
  RPE65 RNA guide
uguggcucucauguucuuuuca

SEQ ID NO: 39896 - RNA, 22 nt, Artificial Sequence
  RPE65 RNA guide
uguguccucaucaaguuagaau

SEQ ID NO: 39897 - RNA, 22 nt, Artificial Sequence
  RPE65 RNA guide
uguguguccucaucaaguuaga

SEQ ID NO: 39898 - RNA, 22 nt, Artificial Sequence
  RPE65 RNA guide
uguuacccuacucauugaucua

SEQ ID NO: 39899 - RNA, 22 nt, Artificial Sequence
  RPE65 RNA guide
uguuaggcauuuuauauggguu

SEQ ID NO: 39900 - RNA, 22 nt, Artificial Sequence
  RPE65 RNA guide
uguucaggaauuuagaauuugg

SEQ ID NO: 39901 - RNA, 22 nt, Artificial Sequence
  RPE65 RNA guide
uguucuuuucaccaaauuacac

SEQ ID NO: 39902 - RNA, 22 nt, Artificial Sequence
  RPE65 RNA guide
uguugacaaugcuaggauuuga

SEQ ID NO: 39903 - RNA, 22 nt, Artificial Sequence
  RPE65 RNA guide
uguuuguccuaugucaaauagc

SEQ ID NO: 39904 - RNA, 22 nt, Artificial Sequence
  RPE65 RNA guide
uuaaacacuuacauggauugga

SEQ ID NO: 39905 - RNA, 22 nt, Artificial Sequence
  RPE65 RNA guide
uuaaguuucaaauccuagcauu

SEQ ID NO: 39906 - RNA, 22 nt, Artificial Sequence
  RPE65 RNA guide
uuaauguggcucucauguucuu

SEQ ID NO: 39907 - RNA, 22 nt, Artificial Sequence
  RPE65 RNA guide
uuacaccaauugcaggaaagca

SEQ ID NO: 39908 - RNA, 22 nt, Artificial Sequence
  RPE65 RNA guide
uuacauggauuggagagaaccc

SEQ ID NO: 39909 - RNA, 22 nt, Artificial Sequence
  RPE65 RNA guide
uuaccagguucaugcuagcuua

SEQ ID NO: 39910 - RNA, 22 nt, Artificial Sequence
  RPE65 RNA guide
uuacccuacucauugaucuauc

SEQ ID NO: 39911 - RNA, 22 nt, Artificial Sequence
  RPE65 RNA guide
uuagaaucauacauucgcagca

SEQ ID NO: 39912 - RNA, 22 nt, Artificial Sequence
  RPE65 RNA guide
uuagagaugaagaaacaauguu

SEQ ID NO: 39913 - RNA, 22 nt, Artificial Sequence
  RPE65 RNA guide
uuaggcauuuuauauggguucu

SEQ ID NO: 39914 - RNA, 22 nt, Artificial Sequence
  RPE65 RNA guide
uuauaaaagcuaugaaaggcag

SEQ ID NO: 39915 - RNA, 22 nt, Artificial Sequence
  RPE65 RNA guide
uuauaagcuagcaugaaccugg

SEQ ID NO: 39916 - RNA, 22 nt, Artificial Sequence
  RPE65 RNA guide
uuauauggguucucuccaaucc

SEQ ID NO: 39917 - RNA, 22 nt, Artificial Sequence
  RPE65 RNA guide
uuaucaagugcuuuccauauuc

SEQ ID NO: 39918 - RNA, 22 nt, Artificial Sequence
  RPE65 RNA guide
uuaugcuagaugcaagggauag

SEQ ID NO: 39919 - RNA, 22 nt, Artificial Sequence
  RPE65 RNA guide
uuauucaugcugcgaauguaug

SEQ ID NO: 39920 - RNA, 22 nt, Artificial Sequence
  RPE65 RNA guide
uucaaauccuagcauugucaac

SEQ ID NO: 39921 - RNA, 22 nt, Artificial Sequence
  RPE65 RNA guide
uucaacauaaauuauucaugcu

SEQ ID NO: 39922 - RNA, 22 nt, Artificial Sequence
  RPE65 RNA guide
uucaccaaauuacaccaauugc

SEQ ID NO: 39923 - RNA, 22 nt, Artificial Sequence
  RPE65 RNA guide
uucagaauuuaugcuagaugca

SEQ ID NO: 39924 - RNA, 22 nt, Artificial Sequence
  RPE65 RNA guide
uucauagcuuuuauaagcuagc

SEQ ID NO: 39925 - RNA, 22 nt, Artificial Sequence
  RPE65 RNA guide
uucaugacacaaauacuuauca

SEQ ID NO: 39926 - RNA, 22 nt, Artificial Sequence
  RPE65 RNA guide
uucaugcuagcuuauaaaagcu

SEQ ID NO: 39927 - RNA, 22 nt, Artificial Sequence
  RPE65 RNA guide
uucaugcugcgaauguaugauu

SEQ ID NO: 39928 - RNA, 22 nt, Artificial Sequence
  RPE65 RNA guide
uuccaaauucuaaauuccugaa

SEQ ID NO: 39929 - RNA, 22 nt, Artificial Sequence
  RPE65 RNA guide
uuccaagcuccaaauggacugc

SEQ ID NO: 39930 - RNA, 22 nt, Artificial Sequence
  RPE65 RNA guide
uuccugaacaucaccuagcacu

SEQ ID NO: 39931 - RNA, 22 nt, Artificial Sequence
  RPE65 RNA guide
uuccugcaauugguguaauuug

SEQ ID NO: 39932 - RNA, 22 nt, Artificial Sequence
  RPE65 RNA guide
uucgcagcaugaauaauuuaug

SEQ ID NO: 39933 - RNA, 22 nt, Artificial Sequence
  RPE65 RNA guide
uucuaaauuccugaacaucacc

SEQ ID NO: 39934 - RNA, 22 nt, Artificial Sequence
  RPE65 RNA guide
uucuaacuugaugaggacacac

SEQ ID NO: 39935 - RNA, 22 nt, Artificial Sequence
  RPE65 RNA guide
uucucuccaauccauguaagug

SEQ ID NO: 39936 - RNA, 22 nt, Artificial Sequence
  RPE65 RNA guide
uucugaauauggaaagcacuug

SEQ ID NO: 39937 - RNA, 22 nt, Artificial Sequence
  RPE65 RNA guide
uucuguguguccucaucaaguu

SEQ ID NO: 39938 - RNA, 22 nt, Artificial Sequence
  RPE65 RNA guide
uucuuuucaccaaauuacacca

SEQ ID NO: 39939 - RNA, 22 nt, Artificial Sequence
  RPE65 RNA guide
uugaaacuuaauguggcucuca

SEQ ID NO: 39940 - RNA, 22 nt, Artificial Sequence
  RPE65 RNA guide
uugacaaugcuaggauuugaaa

SEQ ID NO: 39941 - RNA, 22 nt, Artificial Sequence
  RPE65 RNA guide
uugacauaggacaaacauuguu

SEQ ID NO: 39942 - RNA, 22 nt, Artificial Sequence
  RPE65 RNA guide
uugaucuaucccuugcaucuag

SEQ ID NO: 39943 - RNA, 22 nt, Artificial Sequence
  RPE65 RNA guide
uugaugaggacacacagaauga

SEQ ID NO: 39944 - RNA, 22 nt, Artificial Sequence
  RPE65 RNA guide
uugcaggaaagcaucauagaca

SEQ ID NO: 39945 - RNA, 22 nt, Artificial Sequence
  RPE65 RNA guide
uugccucugucuaugaugcuuu

SEQ ID NO: 39946 - RNA, 22 nt, Artificial Sequence
  RPE65 RNA guide
uuggaauggucauucugugugu

SEQ ID NO: 39947 - RNA, 22 nt, Artificial Sequence
  RPE65 RNA guide
uuggagagaacccauauaaaau

SEQ ID NO: 39948 - RNA, 22 nt, Artificial Sequence
  RPE65 RNA guide
uuggagcuuggaauggucauuc

SEQ ID NO: 39949 - RNA, 22 nt, Artificial Sequence
  RPE65 RNA guide
uuggugaaaagaacaugagagc

SEQ ID NO: 39950 - RNA, 22 nt, Artificial Sequence
  RPE65 RNA guide
uugguguaauuuggugaaaaga

SEQ ID NO: 39951 - RNA, 22 nt, Artificial Sequence
  RPE65 RNA guide
uugucaacaaugacuagcuauu

SEQ ID NO: 39952 - RNA, 22 nt, Artificial Sequence
  RPE65 RNA guide
uuguccuaugucaaauagcuag

SEQ ID NO: 39953 - RNA, 22 nt, Artificial Sequence
  RPE65 RNA guide
uuguugacaaugcuaggauuug

SEQ ID NO: 39954 - RNA, 22 nt, Artificial Sequence
  RPE65 RNA guide
uuuaaacacuuacauggauugg

SEQ ID NO: 39955 - RNA, 22 nt, Artificial Sequence
  RPE65 RNA guide
uuuaccagguucaugcuagcuu

SEQ ID NO: 39956 - RNA, 22 nt, Artificial Sequence
  RPE65 RNA guide
uuuauaagcuagcaugaaccug

SEQ ID NO: 39957 - RNA, 22 nt, Artificial Sequence
  RPE65 RNA guide
uuuauauggguucucuccaauc

SEQ ID NO: 39958 - RNA, 22 nt, Artificial Sequence
  RPE65 RNA guide
uuuaugcuagaugcaagggaua

SEQ ID NO: 39959 - RNA, 22 nt, Artificial Sequence
  RPE65 RNA guide
uuucaaauccuagcauugucaa

SEQ ID NO: 39960 - RNA, 22 nt, Artificial Sequence
  RPE65 RNA guide
uuucaccaaauuacaccaauug

SEQ ID NO: 39961 - RNA, 22 nt, Artificial Sequence
  RPE65 RNA guide
uuucauagcuuuuauaagcuag

SEQ ID NO: 39962 - RNA, 22 nt, Artificial Sequence
  RPE65 RNA guide
uuuccugcaauugguguaauuu

SEQ ID NO: 39963 - RNA, 22 nt, Artificial Sequence
  RPE65 RNA guide
uuugaaacuuaauguggcucuc

SEQ ID NO: 39964 - RNA, 22 nt, Artificial Sequence
  RPE65 RNA guide
uuugacauaggacaaacauugu

SEQ ID NO: 39965 - RNA, 22 nt, Artificial Sequence
  RPE65 RNA guide
uuuggagcuuggaauggucauu

SEQ ID NO: 39966 - RNA, 22 nt, Artificial Sequence
  RPE65 RNA guide
uuuggugaaaagaacaugagag

SEQ ID NO: 39967 - RNA, 22 nt, Artificial Sequence
  RPE65 RNA guide
uuuguccuaugucaaauagcua

SEQ ID NO: 39968 - RNA, 22 nt, Artificial Sequence
  RPE65 RNA guide
uuuuaaacacuuacauggauug

SEQ ID NO: 39969 - RNA, 22 nt, Artificial Sequence
  RPE65 RNA guide
uuuuauaagcuagcaugaaccu

SEQ ID NO: 39970 - RNA, 22 nt, Artificial Sequence
  RPE65 RNA guide
uuuuauauggguucucuccaau

SEQ ID NO: 39971 - RNA, 22 nt, Artificial Sequence
  RPE65 RNA guide
uuuucaccaaauuacaccaauu

SEQ ID NO: 39972 - RNA, 20 nt, Artificial Sequence
  RPE65 RNA guide
aaaagaaaaguaacuaacca

SEQ ID NO: 39973 - RNA, 20 nt, Artificial Sequence
  RPE65 RNA guide
aaaaguaacuaaccagagca

SEQ ID NO: 39974 - RNA, 20 nt, Artificial Sequence
  RPE65 RNA guide
aaaccauaaguuugaguccu

SEQ ID NO: 39975 - RNA, 20 nt, Artificial Sequence
  RPE65 RNA guide
aaacucauacaguaccaugu

SEQ ID NO: 39976 - RNA, 20 nt, Artificial Sequence
  RPE65 RNA guide
aaacuuaugguuucagguca

SEQ ID NO: 39977 - RNA, 20 nt, Artificial Sequence
  RPE65 RNA guide
aaagaaaaguaacuaaccag

SEQ ID NO: 39978 - RNA, 20 nt, Artificial Sequence
  RPE65 RNA guide
aaagaagucugaggacucaa

SEQ ID NO: 39979 - RNA, 20 nt, Artificial Sequence
  RPE65 RNA guide
aaagagaagugcacuuagga

SEQ ID NO: 39980 - RNA, 20 nt, Artificial Sequence
  RPE65 RNA guide
aaagagaugucacagguaac

SEQ ID NO: 39981 - RNA, 20 nt, Artificial Sequence
  RPE65 RNA guide
aaagaggguagaauccagag

SEQ ID NO: 39982 - RNA, 20 nt, Artificial Sequence
  RPE65 RNA guide
aaagggacuucaagcuucau

SEQ ID NO: 39983 - RNA, 20 nt, Artificial Sequence
  RPE65 RNA guide
aaaguaacuaaccagagcac

SEQ ID NO: 39984 - RNA, 20 nt, Artificial Sequence
  RPE65 RNA guide
aaagugaauguccuccaguu

SEQ ID NO: 39985 - RNA, 20 nt, Artificial Sequence
  RPE65 RNA guide
aaauaaagagaugucacagg

SEQ ID NO: 39986 - RNA, 20 nt, Artificial Sequence
  RPE65 RNA guide
aaauaccaacuauaugucuu

SEQ ID NO: 39987 - RNA, 20 nt, Artificial Sequence
  RPE65 RNA guide
aacauaaugcccccucaugu

SEQ ID NO: 39988 - RNA, 20 nt, Artificial Sequence
  RPE65 RNA guide
aaccagagcacuguauggua

SEQ ID NO: 39989 - RNA, 20 nt, Artificial Sequence
  RPE65 RNA guide
aaccauaaguuugaguccuc

SEQ ID NO: 39990 - RNA, 20 nt, Artificial Sequence
  RPE65 RNA guide
aacuaaccagagcacuguau

SEQ ID NO: 39991 - RNA, 20 nt, Artificial Sequence
  RPE65 RNA guide
aacuauaugucuugcacaug

SEQ ID NO: 39992 - RNA, 20 nt, Artificial Sequence
  RPE65 RNA guide
aacucaaggugaaagagggu

SEQ ID NO: 39993 - RNA, 20 nt, Artificial Sequence
  RPE65 RNA guide
aacucauacaguaccaugug

SEQ ID NO: 39994 - RNA, 20 nt, Artificial Sequence
  RPE65 RNA guide
aacuccagauucagacacau

SEQ ID NO: 39995 - RNA, 20 nt, Artificial Sequence
  RPE65 RNA guide
aacucucauccuaagugcac

SEQ ID NO: 39996 - RNA, 20 nt, Artificial Sequence
  RPE65 RNA guide
aacugaaagggacuucaagc

SEQ ID NO: 39997 - RNA, 20 nt, Artificial Sequence
  RPE65 RNA guide
aacuggaggacauucacuuu

SEQ ID NO: 39998 - RNA, 20 nt, Artificial Sequence
  RPE65 RNA guide
aacuuaugguuucaggucaa

SEQ ID NO: 39999 - RNA, 20 nt, Artificial Sequence
  RPE65 RNA guide
aagaaaaguaacuaaccaga

SEQ ID NO: 40000 - RNA, 20 nt, Artificial Sequence
  RPE65 RNA guide
aagaaagagaagugcacuua

SEQ ID NO: 40001 - RNA, 20 nt, Artificial Sequence
  RPE65 RNA guide
aagaagucugaggacucaaa

SEQ ID NO: 40002 - RNA, 20 nt, Artificial Sequence
  RPE65 RNA guide
aagagaagugcacuuaggau

SEQ ID NO: 40003 - RNA, 20 nt, Artificial Sequence
  RPE65 RNA guide
aagagaugucacagguaacu

SEQ ID NO: 40004 - RNA, 20 nt, Artificial Sequence
  RPE65 RNA guide
aagaggguagaauccagaga

SEQ ID NO: 40005 - RNA, 20 nt, Artificial Sequence
  RPE65 RNA guide
aagaguauaaagaagucuga

SEQ ID NO: 40006 - RNA, 20 nt, Artificial Sequence
  RPE65 RNA guide
aagauacauuauaccuuugu

SEQ ID NO: 40007 - RNA, 20 nt, Artificial Sequence
  RPE65 RNA guide
aagcuugaagucccuuucag

SEQ ID NO: 40008 - RNA, 20 nt, Artificial Sequence
  RPE65 RNA guide
aagggacuucaagcuucauc

SEQ ID NO: 40009 - RNA, 20 nt, Artificial Sequence
  RPE65 RNA guide
aagggguagugaugaccuca

SEQ ID NO: 40010 - RNA, 20 nt, Artificial Sequence
  RPE65 RNA guide
aagguauaauguaucuuccu

SEQ ID NO: 40011 - RNA, 20 nt, Artificial Sequence
  RPE65 RNA guide
aaggugaaagaggguagaau

SEQ ID NO: 40012 - RNA, 20 nt, Artificial Sequence
  RPE65 RNA guide
aaggugggaacucaagguga

SEQ ID NO: 40013 - RNA, 20 nt, Artificial Sequence
  RPE65 RNA guide
aaguaaagugaauguccucc

SEQ ID NO: 40014 - RNA, 20 nt, Artificial Sequence
  RPE65 RNA guide
aaguaacuaaccagagcacu

SEQ ID NO: 40015 - RNA, 20 nt, Artificial Sequence
  RPE65 RNA guide
aagucccuuucaguuccaaa

SEQ ID NO: 40016 - RNA, 20 nt, Artificial Sequence
  RPE65 RNA guide
aagucugaggacucaaacuu

SEQ ID NO: 40017 - RNA, 20 nt, Artificial Sequence
  RPE65 RNA guide
aagugaauguccuccaguug

SEQ ID NO: 40018 - RNA, 20 nt, Artificial Sequence
  RPE65 RNA guide
aagugcacuuaggaugagag

SEQ ID NO: 40019 - RNA, 20 nt, Artificial Sequence
  RPE65 RNA guide
aagugcacuucucuuucuuc

SEQ ID NO: 40020 - RNA, 20 nt, Artificial Sequence
  RPE65 RNA guide
aaguuugaguccucagacuu

SEQ ID NO: 40021 - RNA, 20 nt, Artificial Sequence
  RPE65 RNA guide
aauaaagagaugucacaggu

SEQ ID NO: 40022 - RNA, 20 nt, Artificial Sequence
  RPE65 RNA guide
aauaccaacuauaugucuug

SEQ ID NO: 40023 - RNA, 20 nt, Artificial Sequence
  RPE65 RNA guide
aauccagagagaugggaaga

SEQ ID NO: 40024 - RNA, 20 nt, Artificial Sequence
  RPE65 RNA guide
aaucuggaguuaccugugac

SEQ ID NO: 40025 - RNA, 20 nt, Artificial Sequence
  RPE65 RNA guide
aaugcccccucaugugucug

SEQ ID NO: 40026 - RNA, 20 nt, Artificial Sequence
  RPE65 RNA guide
aauguaucuuccuucucuca

SEQ ID NO: 40027 - RNA, 20 nt, Artificial Sequence
  RPE65 RNA guide
aauguccuccaguugagaga

SEQ ID NO: 40028 - RNA, 20 nt, Artificial Sequence
  RPE65 RNA guide
acacaugagggggcauuaug

SEQ ID NO: 40029 - RNA, 20 nt, Artificial Sequence
  RPE65 RNA guide
acagguaacuccagauucag

SEQ ID NO: 40030 - RNA, 20 nt, Artificial Sequence
  RPE65 RNA guide
acaguaccaugugcaagaca

SEQ ID NO: 40031 - RNA, 20 nt, Artificial Sequence
  RPE65 RNA guide
acagugcucugguuaguuac

SEQ ID NO: 40032 - RNA, 20 nt, Artificial Sequence
  RPE65 RNA guide
acauaaugcccccucaugug

SEQ ID NO: 40033 - RNA, 20 nt, Artificial Sequence
  RPE65 RNA guide
acauaguaccauacgaaauu

SEQ ID NO: 40034 - RNA, 20 nt, Artificial Sequence
  RPE65 RNA guide
acaucaaauaaagagauguc

SEQ ID NO: 40035 - RNA, 20 nt, Artificial Sequence
  RPE65 RNA guide
acaugagggggcauuauguu

SEQ ID NO: 40036 - RNA, 20 nt, Artificial Sequence
  RPE65 RNA guide
acaugguacuguaugaguuu

SEQ ID NO: 40037 - RNA, 20 nt, Artificial Sequence
  RPE65 RNA guide
acauuauaccuuugucccua

SEQ ID NO: 40038 - RNA, 20 nt, Artificial Sequence
  RPE65 RNA guide
accaacuauaugucuugcac

SEQ ID NO: 40039 - RNA, 20 nt, Artificial Sequence
  RPE65 RNA guide
accagagcacuguaugguau

SEQ ID NO: 40040 - RNA, 20 nt, Artificial Sequence
  RPE65 RNA guide
accauaaguuugaguccuca

SEQ ID NO: 40041 - RNA, 20 nt, Artificial Sequence
  RPE65 RNA guide
accauacagugcucugguua

SEQ ID NO: 40042 - RNA, 20 nt, Artificial Sequence
  RPE65 RNA guide
accauacgaaauugacauuu

SEQ ID NO: 40043 - RNA, 20 nt, Artificial Sequence
  RPE65 RNA guide
accaugugcaagacauauag

SEQ ID NO: 40044 - RNA, 20 nt, Artificial Sequence
  RPE65 RNA guide
accccuugaacucucauccu

SEQ ID NO: 40045 - RNA, 20 nt, Artificial Sequence
  RPE65 RNA guide
acccucuuucaccuugaguu

SEQ ID NO: 40046 - RNA, 20 nt, Artificial Sequence
  RPE65 RNA guide
accuagggacaaagguauaa

SEQ ID NO: 40047 - RNA, 20 nt, Artificial Sequence
  RPE65 RNA guide
accucagaccuagggacaaa

SEQ ID NO: 40048 - RNA, 20 nt, Artificial Sequence
  RPE65 RNA guide
accugaaaccauaaguuuga

SEQ ID NO: 40049 - RNA, 20 nt, Artificial Sequence
  RPE65 RNA guide
accugugacaucucuuuauu

SEQ ID NO: 40050 - RNA, 20 nt, Artificial Sequence
  RPE65 RNA guide
accuucaugcagaacauaau

SEQ ID NO: 40051 - RNA, 20 nt, Artificial Sequence
  RPE65 RNA guide
accuugaguucccaccuuca

SEQ ID NO: 40052 - RNA, 20 nt, Artificial Sequence
  RPE65 RNA guide
accuuugucccuaggucuga

SEQ ID NO: 40053 - RNA, 20 nt, Artificial Sequence
  RPE65 RNA guide
acggaaguaaagugaauguc

SEQ ID NO: 40054 - RNA, 20 nt, Artificial Sequence
  RPE65 RNA guide
acuaaccagagcacuguaug

SEQ ID NO: 40055 - RNA, 20 nt, Artificial Sequence
  RPE65 RNA guide
acuaccccuugaacucucau

SEQ ID NO: 40056 - RNA, 20 nt, Artificial Sequence
  RPE65 RNA guide
acuagaugaagcuugaaguc

SEQ ID NO: 40057 - RNA, 20 nt, Artificial Sequence
  RPE65 RNA guide
acuauaugucuugcacaugg

SEQ ID NO: 40058 - RNA, 20 nt, Artificial Sequence
  RPE65 RNA guide
acucaaacuuaugguuucag

SEQ ID NO: 40059 - RNA, 20 nt, Artificial Sequence
  RPE65 RNA guide
acucaaggugaaagagggua

SEQ ID NO: 40060 - RNA, 20 nt, Artificial Sequence
  RPE65 RNA guide
acucauacaguaccaugugc

SEQ ID NO: 40061 - RNA, 20 nt, Artificial Sequence
  RPE65 RNA guide
acuccagauucagacacaug

SEQ ID NO: 40062 - RNA, 20 nt, Artificial Sequence
  RPE65 RNA guide
acucucauccuaagugcacu

SEQ ID NO: 40063 - RNA, 20 nt, Artificial Sequence
  RPE65 RNA guide
acugaaagggacuucaagcu

SEQ ID NO: 40064 - RNA, 20 nt, Artificial Sequence
  RPE65 RNA guide
acuggaggacauucacuuua

SEQ ID NO: 40065 - RNA, 20 nt, Artificial Sequence
  RPE65 RNA guide
acuguaugaguuuggaacug

SEQ ID NO: 40066 - RNA, 20 nt, Artificial Sequence
  RPE65 RNA guide
acuuaggaugagaguucaag

SEQ ID NO: 40067 - RNA, 20 nt, Artificial Sequence
  RPE65 RNA guide
acuuaugguuucaggucaau

SEQ ID NO: 40068 - RNA, 20 nt, Artificial Sequence
  RPE65 RNA guide
acuucaagcuucaucuagua

SEQ ID NO: 40069 - RNA, 20 nt, Artificial Sequence
  RPE65 RNA guide
acuucucuuucuucccaucu

SEQ ID NO: 40070 - RNA, 20 nt, Artificial Sequence
  RPE65 RNA guide
acuuucuauacuagaugaag

SEQ ID NO: 40071 - RNA, 20 nt, Artificial Sequence
  RPE65 RNA guide
agaaaaguaacuaaccagag

SEQ ID NO: 40072 - RNA, 20 nt, Artificial Sequence
  RPE65 RNA guide
agaaagagaagugcacuuag

SEQ ID NO: 40073 - RNA, 20 nt, Artificial Sequence
  RPE65 RNA guide
agaacauaaugcccccucau

SEQ ID NO: 40074 - RNA, 20 nt, Artificial Sequence
  RPE65 RNA guide
agaagucugaggacucaaac

SEQ ID NO: 40075 - RNA, 20 nt, Artificial Sequence
  RPE65 RNA guide
agaagugcacuuaggaugag

SEQ ID NO: 40076 - RNA, 20 nt, Artificial Sequence
  RPE65 RNA guide
agaauccagagagaugggaa

SEQ ID NO: 40077 - RNA, 20 nt, Artificial Sequence
  RPE65 RNA guide
agacacaugagggggcauua

SEQ ID NO: 40078 - RNA, 20 nt, Artificial Sequence
  RPE65 RNA guide
agaccuagggacaaagguau

SEQ ID NO: 40079 - RNA, 20 nt, Artificial Sequence
  RPE65 RNA guide
agagaaggaagauacauuau

SEQ ID NO: 40080 - RNA, 20 nt, Artificial Sequence
  RPE65 RNA guide
agagaagugcacuuaggaug

SEQ ID NO: 40081 - RNA, 20 nt, Artificial Sequence
  RPE65 RNA guide
agagagaugggaagaaagag

SEQ ID NO: 40082 - RNA, 20 nt, Artificial Sequence
  RPE65 RNA guide
agagaugggaagaaagagaa

SEQ ID NO: 40083 - RNA, 20 nt, Artificial Sequence
  RPE65 RNA guide
agagaugucacagguaacuc

SEQ ID NO: 40084 - RNA, 20 nt, Artificial Sequence
  RPE65 RNA guide
agagcacuguaugguauaca

SEQ ID NO: 40085 - RNA, 20 nt, Artificial Sequence
  RPE65 RNA guide
agaggguagaauccagagag

SEQ ID NO: 40086 - RNA, 20 nt, Artificial Sequence
  RPE65 RNA guide
agaguauaaagaagucugag

SEQ ID NO: 40087 - RNA, 20 nt, Artificial Sequence
  RPE65 RNA guide
agaguucaagggguagugau

SEQ ID NO: 40088 - RNA, 20 nt, Artificial Sequence
  RPE65 RNA guide
agauacauuauaccuuuguc

SEQ ID NO: 40089 - RNA, 20 nt, Artificial Sequence
  RPE65 RNA guide
agaugaagcuugaagucccu

SEQ ID NO: 40090 - RNA, 20 nt, Artificial Sequence
  RPE65 RNA guide
agaugggaagaaagagaagu

SEQ ID NO: 40091 - RNA, 20 nt, Artificial Sequence
  RPE65 RNA guide
agaugucacagguaacucca

SEQ ID NO: 40092 - RNA, 20 nt, Artificial Sequence
  RPE65 RNA guide
agauucagacacaugagggg

SEQ ID NO: 40093 - RNA, 20 nt, Artificial Sequence
  RPE65 RNA guide
agauugaccugaaaccauaa

SEQ ID NO: 40094 - RNA, 20 nt, Artificial Sequence
  RPE65 RNA guide
agcacuguaugguauacauc

SEQ ID NO: 40095 - RNA, 20 nt, Artificial Sequence
  RPE65 RNA guide
agcauaugcagauugaccug

SEQ ID NO: 40096 - RNA, 20 nt, Artificial Sequence
  RPE65 RNA guide
agcuugaagucccuuucagu

SEQ ID NO: 40097 - RNA, 20 nt, Artificial Sequence
  RPE65 RNA guide
aggaagauacauuauaccuu

SEQ ID NO: 40098 - RNA, 20 nt, Artificial Sequence
  RPE65 RNA guide
aggacauucacuuuacuucc

SEQ ID NO: 40099 - RNA, 20 nt, Artificial Sequence
  RPE65 RNA guide
aggacucaaacuuaugguuu

SEQ ID NO: 40100 - RNA, 20 nt, Artificial Sequence
  RPE65 RNA guide
aggaugagaguucaaggggu

SEQ ID NO: 40101 - RNA, 20 nt, Artificial Sequence
  RPE65 RNA guide
agggacaaagguauaaugua

SEQ ID NO: 40102 - RNA, 20 nt, Artificial Sequence
  RPE65 RNA guide
agggacuucaagcuucaucu

SEQ ID NO: 40103 - RNA, 20 nt, Artificial Sequence
  RPE65 RNA guide
agggggcauuauguucugca

SEQ ID NO: 40104 - RNA, 20 nt, Artificial Sequence
  RPE65 RNA guide
agggguagugaugaccucag

SEQ ID NO: 40105 - RNA, 20 nt, Artificial Sequence
  RPE65 RNA guide
aggguagaauccagagagau

SEQ ID NO: 40106 - RNA, 20 nt, Artificial Sequence
  RPE65 RNA guide
agguaacuccagauucagac

SEQ ID NO: 40107 - RNA, 20 nt, Artificial Sequence
  RPE65 RNA guide
agguauaauguaucuuccuu

SEQ ID NO: 40108 - RNA, 20 nt, Artificial Sequence
  RPE65 RNA guide
aggucaaucugcauaugcua

SEQ ID NO: 40109 - RNA, 20 nt, Artificial Sequence
  RPE65 RNA guide
aggucaucacuaccccuuga

SEQ ID NO: 40110 - RNA, 20 nt, Artificial Sequence
  RPE65 RNA guide
aggucugaggucaucacuac

SEQ ID NO: 40111 - RNA, 20 nt, Artificial Sequence
  RPE65 RNA guide
aggugaaagaggguagaauc

SEQ ID NO: 40112 - RNA, 20 nt, Artificial Sequence
  RPE65 RNA guide
aggugggaacucaaggugaa

SEQ ID NO: 40113 - RNA, 20 nt, Artificial Sequence
  RPE65 RNA guide
aguaaagugaauguccucca

SEQ ID NO: 40114 - RNA, 20 nt, Artificial Sequence
  RPE65 RNA guide
aguaacuaaccagagcacug

SEQ ID NO: 40115 - RNA, 20 nt, Artificial Sequence
  RPE65 RNA guide
aguaccaugugcaagacaua

SEQ ID NO: 40116 - RNA, 20 nt, Artificial Sequence
  RPE65 RNA guide
aguauaaagaagucugagga

SEQ ID NO: 40117 - RNA, 20 nt, Artificial Sequence
  RPE65 RNA guide
agucccuuucaguuccaaac

SEQ ID NO: 40118 - RNA, 20 nt, Artificial Sequence
  RPE65 RNA guide
aguccucagacuucuuuaua

SEQ ID NO: 40119 - RNA, 20 nt, Artificial Sequence
  RPE65 RNA guide
agucugaggacucaaacuua

SEQ ID NO: 40120 - RNA, 20 nt, Artificial Sequence
  RPE65 RNA guide
agugaauguccuccaguuga

SEQ ID NO: 40121 - RNA, 20 nt, Artificial Sequence
  RPE65 RNA guide
agugaugaccucagaccuag

SEQ ID NO: 40122 - RNA, 20 nt, Artificial Sequence
  RPE65 RNA guide
agugcacuuaggaugagagu

SEQ ID NO: 40123 - RNA, 20 nt, Artificial Sequence
  RPE65 RNA guide
agugcacuucucuuucuucc

SEQ ID NO: 40124 - RNA, 20 nt, Artificial Sequence
  RPE65 RNA guide
agugcucugguuaguuacuu

SEQ ID NO: 40125 - RNA, 20 nt, Artificial Sequence
  RPE65 RNA guide
aguuaccugugacaucucuu

SEQ ID NO: 40126 - RNA, 20 nt, Artificial Sequence
  RPE65 RNA guide
aguucaagggguagugauga

SEQ ID NO: 40127 - RNA, 20 nt, Artificial Sequence
  RPE65 RNA guide
aguuccaaacucauacagua

SEQ ID NO: 40128 - RNA, 20 nt, Artificial Sequence
  RPE65 RNA guide
aguucccaccuucaugcaga

SEQ ID NO: 40129 - RNA, 20 nt, Artificial Sequence
  RPE65 RNA guide
aguugagagaaggaagauac

SEQ ID NO: 40130 - RNA, 20 nt, Artificial Sequence
  RPE65 RNA guide
aguuugaguccucagacuuc

SEQ ID NO: 40131 - RNA, 20 nt, Artificial Sequence
  RPE65 RNA guide
aguuuggaacugaaagggac

SEQ ID NO: 40132 - RNA, 20 nt, Artificial Sequence
  RPE65 RNA guide
auaaagaagucugaggacuc

SEQ ID NO: 40133 - RNA, 20 nt, Artificial Sequence
  RPE65 RNA guide
auaaagagaugucacaggua

SEQ ID NO: 40134 - RNA, 20 nt, Artificial Sequence
  RPE65 RNA guide
auaagaguauaaagaagucu

SEQ ID NO: 40135 - RNA, 20 nt, Artificial Sequence
  RPE65 RNA guide
auaaguuugaguccucagac

SEQ ID NO: 40136 - RNA, 20 nt, Artificial Sequence
  RPE65 RNA guide
auaaugcccccucauguguc

SEQ ID NO: 40137 - RNA, 20 nt, Artificial Sequence
  RPE65 RNA guide
auaauguaucuuccuucucu

SEQ ID NO: 40138 - RNA, 20 nt, Artificial Sequence
  RPE65 RNA guide
auacaguaccaugugcaaga

SEQ ID NO: 40139 - RNA, 20 nt, Artificial Sequence
  RPE65 RNA guide
auacagugcucugguuaguu

SEQ ID NO: 40140 - RNA, 20 nt, Artificial Sequence
  RPE65 RNA guide
auacauuauaccuuuguccc

SEQ ID NO: 40141 - RNA, 20 nt, Artificial Sequence
  RPE65 RNA guide
auaccaacuauaugucuugc

SEQ ID NO: 40142 - RNA, 20 nt, Artificial Sequence
  RPE65 RNA guide
auaccauacagugcucuggu

SEQ ID NO: 40143 - RNA, 20 nt, Artificial Sequence
  RPE65 RNA guide
auaccuuugucccuaggucu

SEQ ID NO: 40144 - RNA, 20 nt, Artificial Sequence
  RPE65 RNA guide
auacuagaugaagcuugaag

SEQ ID NO: 40145 - RNA, 20 nt, Artificial Sequence
  RPE65 RNA guide
auaugcagauugaccugaaa

SEQ ID NO: 40146 - RNA, 20 nt, Artificial Sequence
  RPE65 RNA guide
auaugucuugcacaugguac

SEQ ID NO: 40147 - RNA, 20 nt, Artificial Sequence
  RPE65 RNA guide
aucaaauaaagagaugucac

SEQ ID NO: 40148 - RNA, 20 nt, Artificial Sequence
  RPE65 RNA guide
aucacuaccccuugaacucu

SEQ ID NO: 40149 - RNA, 20 nt, Artificial Sequence
  RPE65 RNA guide
auccagagagaugggaagaa

SEQ ID NO: 40150 - RNA, 20 nt, Artificial Sequence
  RPE65 RNA guide
auccuaagugcacuucucuu

SEQ ID NO: 40151 - RNA, 20 nt, Artificial Sequence
  RPE65 RNA guide
aucucucuggauucuacccu

SEQ ID NO: 40152 - RNA, 20 nt, Artificial Sequence
  RPE65 RNA guide
aucuggaguuaccugugaca

SEQ ID NO: 40153 - RNA, 20 nt, Artificial Sequence
  RPE65 RNA guide
aucuuccuucucucaacugg

SEQ ID NO: 40154 - RNA, 20 nt, Artificial Sequence
  RPE65 RNA guide
augaagcuugaagucccuuu

SEQ ID NO: 40155 - RNA, 20 nt, Artificial Sequence
  RPE65 RNA guide
augaaggugggaacucaagg

SEQ ID NO: 40156 - RNA, 20 nt, Artificial Sequence
  RPE65 RNA guide
augaccucagaccuagggac

SEQ ID NO: 40157 - RNA, 20 nt, Artificial Sequence
  RPE65 RNA guide
augagaguucaagggguagu

SEQ ID NO: 40158 - RNA, 20 nt, Artificial Sequence
  RPE65 RNA guide
augagggggcauuauguucu

SEQ ID NO: 40159 - RNA, 20 nt, Artificial Sequence
  RPE65 RNA guide
augaguuuggaacugaaagg

SEQ ID NO: 40160 - RNA, 20 nt, Artificial Sequence
  RPE65 RNA guide
augcagaacauaaugccccc

SEQ ID NO: 40161 - RNA, 20 nt, Artificial Sequence
  RPE65 RNA guide
augcagauugaccugaaacc

SEQ ID NO: 40162 - RNA, 20 nt, Artificial Sequence
  RPE65 RNA guide
augcccccucaugugucuga

SEQ ID NO: 40163 - RNA, 20 nt, Artificial Sequence
  RPE65 RNA guide
augggaagaaagagaagugc

SEQ ID NO: 40164 - RNA, 20 nt, Artificial Sequence
  RPE65 RNA guide
augguacuguaugaguuugg

SEQ ID NO: 40165 - RNA, 20 nt, Artificial Sequence
  RPE65 RNA guide
augguuucaggucaaucugc

SEQ ID NO: 40166 - RNA, 20 nt, Artificial Sequence
  RPE65 RNA guide
auguauaccauacagugcuc

SEQ ID NO: 40167 - RNA, 20 nt, Artificial Sequence
  RPE65 RNA guide
auguaucuuccuucucucaa

SEQ ID NO: 40168 - RNA, 20 nt, Artificial Sequence
  RPE65 RNA guide
augucaauuucguaugguac

SEQ ID NO: 40169 - RNA, 20 nt, Artificial Sequence
  RPE65 RNA guide
augucacagguaacuccaga

SEQ ID NO: 40170 - RNA, 20 nt, Artificial Sequence
  RPE65 RNA guide
auguccuccaguugagagaa

SEQ ID NO: 40171 - RNA, 20 nt, Artificial Sequence
  RPE65 RNA guide
augucuugcacaugguacug

SEQ ID NO: 40172 - RNA, 20 nt, Artificial Sequence
  RPE65 RNA guide
augugcaagacauauaguug

SEQ ID NO: 40173 - RNA, 20 nt, Artificial Sequence
  RPE65 RNA guide
augugucugaaucuggaguu

SEQ ID NO: 40174 - RNA, 20 nt, Artificial Sequence
  RPE65 RNA guide
auguucugcaugaagguggg

SEQ ID NO: 40175 - RNA, 20 nt, Artificial Sequence
  RPE65 RNA guide
auuauaccuuugucccuagg

SEQ ID NO: 40176 - RNA, 20 nt, Artificial Sequence
  RPE65 RNA guide
auuauguucugcaugaaggu

SEQ ID NO: 40177 - RNA, 20 nt, Artificial Sequence
  RPE65 RNA guide
auucagacacaugagggggc

SEQ ID NO: 40178 - RNA, 20 nt, Artificial Sequence
  RPE65 RNA guide
auucuacccucuuucaccuu

SEQ ID NO: 40179 - RNA, 20 nt, Artificial Sequence
  RPE65 RNA guide
auugaccugaaaccauaagu

SEQ ID NO: 40180 - RNA, 20 nt, Artificial Sequence
  RPE65 RNA guide
auuugauguauaccauacag

SEQ ID NO: 40181 - RNA, 20 nt, Artificial Sequence
  RPE65 RNA guide
caaacucauacaguaccaug

SEQ ID NO: 40182 - RNA, 20 nt, Artificial Sequence
  RPE65 RNA guide
caaacuuaugguuucagguc

SEQ ID NO: 40183 - RNA, 20 nt, Artificial Sequence
  RPE65 RNA guide
caaagguauaauguaucuuc

SEQ ID NO: 40184 - RNA, 20 nt, Artificial Sequence
  RPE65 RNA guide
caaauaaagagaugucacag

SEQ ID NO: 40185 - RNA, 20 nt, Artificial Sequence
  RPE65 RNA guide
caacuauaugucuugcacau

SEQ ID NO: 40186 - RNA, 20 nt, Artificial Sequence
  RPE65 RNA guide
caacuggaggacauucacuu

SEQ ID NO: 40187 - RNA, 20 nt, Artificial Sequence
  RPE65 RNA guide
caagcuucaucuaguauaga

SEQ ID NO: 40188 - RNA, 20 nt, Artificial Sequence
  RPE65 RNA guide
caagggguagugaugaccuc

SEQ ID NO: 40189 - RNA, 20 nt, Artificial Sequence
  RPE65 RNA guide
caaggugaaagaggguagaa

SEQ ID NO: 40190 - RNA, 20 nt, Artificial Sequence
  RPE65 RNA guide
cacagguaacuccagauuca

SEQ ID NO: 40191 - RNA, 20 nt, Artificial Sequence
  RPE65 RNA guide
cacaugagggggcauuaugu

SEQ ID NO: 40192 - RNA, 20 nt, Artificial Sequence
  RPE65 RNA guide
cacaugguacuguaugaguu

SEQ ID NO: 40193 - RNA, 20 nt, Artificial Sequence
  RPE65 RNA guide
caccuucaugcagaacauaa

SEQ ID NO: 40194 - RNA, 20 nt, Artificial Sequence
  RPE65 RNA guide
caccuugaguucccaccuuc

SEQ ID NO: 40195 - RNA, 20 nt, Artificial Sequence
  RPE65 RNA guide
cacuaccccuugaacucuca

SEQ ID NO: 40196 - RNA, 20 nt, Artificial Sequence
  RPE65 RNA guide
cacuuaggaugagaguucaa

SEQ ID NO: 40197 - RNA, 20 nt, Artificial Sequence
  RPE65 RNA guide
cacuucucuuucuucccauc

SEQ ID NO: 40198 - RNA, 20 nt, Artificial Sequence
  RPE65 RNA guide
cagaacauaaugcccccuca

SEQ ID NO: 40199 - RNA, 20 nt, Artificial Sequence
  RPE65 RNA guide
cagacacaugagggggcauu

SEQ ID NO: 40200 - RNA, 20 nt, Artificial Sequence
  RPE65 RNA guide
cagaccuagggacaaaggua

SEQ ID NO: 40201 - RNA, 20 nt, Artificial Sequence
  RPE65 RNA guide
cagagagaugggaagaaaga

SEQ ID NO: 40202 - RNA, 20 nt, Artificial Sequence
  RPE65 RNA guide
cagagcacuguaugguauac

SEQ ID NO: 40203 - RNA, 20 nt, Artificial Sequence
  RPE65 RNA guide
cagauucagacacaugaggg

SEQ ID NO: 40204 - RNA, 20 nt, Artificial Sequence
  RPE65 RNA guide
cagauugaccugaaaccaua

SEQ ID NO: 40205 - RNA, 20 nt, Artificial Sequence
  RPE65 RNA guide
cagguaacuccagauucaga

SEQ ID NO: 40206 - RNA, 20 nt, Artificial Sequence
  RPE65 RNA guide
caggucaaucugcauaugcu

SEQ ID NO: 40207 - RNA, 20 nt, Artificial Sequence
  RPE65 RNA guide
caguaccaugugcaagacau

SEQ ID NO: 40208 - RNA, 20 nt, Artificial Sequence
  RPE65 RNA guide
cagugcucugguuaguuacu

SEQ ID NO: 40209 - RNA, 20 nt, Artificial Sequence
  RPE65 RNA guide
caguuccaaacucauacagu

SEQ ID NO: 40210 - RNA, 20 nt, Artificial Sequence
  RPE65 RNA guide
caguugagagaaggaagaua

SEQ ID NO: 40211 - RNA, 20 nt, Artificial Sequence
  RPE65 RNA guide
cauaaguuugaguccucaga

SEQ ID NO: 40212 - RNA, 20 nt, Artificial Sequence
  RPE65 RNA guide
cauaaugcccccucaugugu

SEQ ID NO: 40213 - RNA, 20 nt, Artificial Sequence
  RPE65 RNA guide
cauacaguaccaugugcaag

SEQ ID NO: 40214 - RNA, 20 nt, Artificial Sequence
  RPE65 RNA guide
cauacagugcucugguuagu

SEQ ID NO: 40215 - RNA, 20 nt, Artificial Sequence
  RPE65 RNA guide
cauaguaccauacgaaauug

SEQ ID NO: 40216 - RNA, 20 nt, Artificial Sequence
  RPE65 RNA guide
cauaugcagauugaccugaa

SEQ ID NO: 40217 - RNA, 20 nt, Artificial Sequence
  RPE65 RNA guide
caucaaauaaagagauguca

SEQ ID NO: 40218 - RNA, 20 nt, Artificial Sequence
  RPE65 RNA guide
caucacuaccccuugaacuc

SEQ ID NO: 40219 - RNA, 20 nt, Artificial Sequence
  RPE65 RNA guide
cauccuaagugcacuucucu

SEQ ID NO: 40220 - RNA, 20 nt, Artificial Sequence
  RPE65 RNA guide
caucucucuggauucuaccc

SEQ ID NO: 40221 - RNA, 20 nt, Artificial Sequence
  RPE65 RNA guide
caugaaggugggaacucaag

SEQ ID NO: 40222 - RNA, 20 nt, Artificial Sequence
  RPE65 RNA guide
caugagggggcauuauguuc

SEQ ID NO: 40223 - RNA, 20 nt, Artificial Sequence
  RPE65 RNA guide
caugcagaacauaaugcccc

SEQ ID NO: 40224 - RNA, 20 nt, Artificial Sequence
  RPE65 RNA guide
caugguacuguaugaguuug

SEQ ID NO: 40225 - RNA, 20 nt, Artificial Sequence
  RPE65 RNA guide
caugugcaagacauauaguu

SEQ ID NO: 40226 - RNA, 20 nt, Artificial Sequence
  RPE65 RNA guide
caugugucugaaucuggagu

SEQ ID NO: 40227 - RNA, 20 nt, Artificial Sequence
  RPE65 RNA guide
cauuauaccuuugucccuag

SEQ ID NO: 40228 - RNA, 20 nt, Artificial Sequence
  RPE65 RNA guide
cauuauguucugcaugaagg

SEQ ID NO: 40229 - RNA, 20 nt, Artificial Sequence
  RPE65 RNA guide
ccaaaaaugucaauuucgua

SEQ ID NO: 40230 - RNA, 20 nt, Artificial Sequence
  RPE65 RNA guide
ccaaacucauacaguaccau

SEQ ID NO: 40231 - RNA, 20 nt, Artificial Sequence
  RPE65 RNA guide
ccaacuauaugucuugcaca

SEQ ID NO: 40232 - RNA, 20 nt, Artificial Sequence
  RPE65 RNA guide
ccaccuucaugcagaacaua

SEQ ID NO: 40233 - RNA, 20 nt, Artificial Sequence
  RPE65 RNA guide
ccagagagaugggaagaaag

SEQ ID NO: 40234 - RNA, 20 nt, Artificial Sequence
  RPE65 RNA guide
ccagagcacuguaugguaua

SEQ ID NO: 40235 - RNA, 20 nt, Artificial Sequence
  RPE65 RNA guide
ccagauucagacacaugagg

SEQ ID NO: 40236 - RNA, 20 nt, Artificial Sequence
  RPE65 RNA guide
ccaguugagagaaggaagau

SEQ ID NO: 40237 - RNA, 20 nt, Artificial Sequence
  RPE65 RNA guide
ccauaaguuugaguccucag

SEQ ID NO: 40238 - RNA, 20 nt, Artificial Sequence
  RPE65 RNA guide
ccauacagugcucugguuag

SEQ ID NO: 40239 - RNA, 20 nt, Artificial Sequence
  RPE65 RNA guide
ccauacgaaauugacauuuu

SEQ ID NO: 40240 - RNA, 20 nt, Artificial Sequence
  RPE65 RNA guide
ccaucucucuggauucuacc

SEQ ID NO: 40241 - RNA, 20 nt, Artificial Sequence
  RPE65 RNA guide
ccaugugcaagacauauagu

SEQ ID NO: 40242 - RNA, 20 nt, Artificial Sequence
  RPE65 RNA guide
cccaccuucaugcagaacau

SEQ ID NO: 40243 - RNA, 20 nt, Artificial Sequence
  RPE65 RNA guide
cccaucucucuggauucuac

SEQ ID NO: 40244 - RNA, 20 nt, Artificial Sequence
  RPE65 RNA guide
cccccucaugugucugaauc

SEQ ID NO: 40245 - RNA, 20 nt, Artificial Sequence
  RPE65 RNA guide
ccccucaugugucugaaucu

SEQ ID NO: 40246 - RNA, 20 nt, Artificial Sequence
  RPE65 RNA guide
ccccuugaacucucauccua

SEQ ID NO: 40247 - RNA, 20 nt, Artificial Sequence
  RPE65 RNA guide
cccuaggucugaggucauca

SEQ ID NO: 40248 - RNA, 20 nt, Artificial Sequence
  RPE65 RNA guide
cccucaugugucugaaucug

SEQ ID NO: 40249 - RNA, 20 nt, Artificial Sequence
  RPE65 RNA guide
cccucuuucaccuugaguuc

SEQ ID NO: 40250 - RNA, 20 nt, Artificial Sequence
  RPE65 RNA guide
cccuugaacucucauccuaa

SEQ ID NO: 40251 - RNA, 20 nt, Artificial Sequence
  RPE65 RNA guide
cccuuucaguuccaaacuca

SEQ ID NO: 40252 - RNA, 20 nt, Artificial Sequence
  RPE65 RNA guide
ccuaagugcacuucucuuuc

SEQ ID NO: 40253 - RNA, 20 nt, Artificial Sequence
  RPE65 RNA guide
ccuagggacaaagguauaau

SEQ ID NO: 40254 - RNA, 20 nt, Artificial Sequence
  RPE65 RNA guide
ccuaggucugaggucaucac

SEQ ID NO: 40255 - RNA, 20 nt, Artificial Sequence
  RPE65 RNA guide
ccucagaccuagggacaaag

SEQ ID NO: 40256 - RNA, 20 nt, Artificial Sequence
  RPE65 RNA guide
ccucagacuucuuuauacuc

SEQ ID NO: 40257 - RNA, 20 nt, Artificial Sequence
  RPE65 RNA guide
ccucaugugucugaaucugg

SEQ ID NO: 40258 - RNA, 20 nt, Artificial Sequence
  RPE65 RNA guide
ccuccaguugagagaaggaa

SEQ ID NO: 40259 - RNA, 20 nt, Artificial Sequence
  RPE65 RNA guide
ccucuuucaccuugaguucc

SEQ ID NO: 40260 - RNA, 20 nt, Artificial Sequence
  RPE65 RNA guide
ccugaaaccauaaguuugag

SEQ ID NO: 40261 - RNA, 20 nt, Artificial Sequence
  RPE65 RNA guide
ccugugacaucucuuuauuu

SEQ ID NO: 40262 - RNA, 20 nt, Artificial Sequence
  RPE65 RNA guide
ccuucaugcagaacauaaug

SEQ ID NO: 40263 - RNA, 20 nt, Artificial Sequence
  RPE65 RNA guide
ccuucucucaacuggaggac

SEQ ID NO: 40264 - RNA, 20 nt, Artificial Sequence
  RPE65 RNA guide
ccuugaacucucauccuaag

SEQ ID NO: 40265 - RNA, 20 nt, Artificial Sequence
  RPE65 RNA guide
ccuugaguucccaccuucau

SEQ ID NO: 40266 - RNA, 20 nt, Artificial Sequence
  RPE65 RNA guide
ccuuucaguuccaaacucau

SEQ ID NO: 40267 - RNA, 20 nt, Artificial Sequence
  RPE65 RNA guide
ccuuugucccuaggucugag

SEQ ID NO: 40268 - RNA, 20 nt, Artificial Sequence
  RPE65 RNA guide
cggaaguaaagugaaugucc

SEQ ID NO: 40269 - RNA, 20 nt, Artificial Sequence
  RPE65 RNA guide
cguaugguacuauguaaaua

SEQ ID NO: 40270 - RNA, 20 nt, Artificial Sequence
  RPE65 RNA guide
cuaaccagagcacuguaugg

SEQ ID NO: 40271 - RNA, 20 nt, Artificial Sequence
  RPE65 RNA guide
cuaagugcacuucucuuucu

SEQ ID NO: 40272 - RNA, 20 nt, Artificial Sequence
  RPE65 RNA guide
cuaccccuugaacucucauc

SEQ ID NO: 40273 - RNA, 20 nt, Artificial Sequence
  RPE65 RNA guide
cuacccucuuucaccuugag

SEQ ID NO: 40274 - RNA, 20 nt, Artificial Sequence
  RPE65 RNA guide
cuacggaaguaaagugaaug

SEQ ID NO: 40275 - RNA, 20 nt, Artificial Sequence
  RPE65 RNA guide
cuagaugaagcuugaagucc

SEQ ID NO: 40276 - RNA, 20 nt, Artificial Sequence
  RPE65 RNA guide
cuagggacaaagguauaaug

SEQ ID NO: 40277 - RNA, 20 nt, Artificial Sequence
  RPE65 RNA guide
cuaggucugaggucaucacu

SEQ ID NO: 40278 - RNA, 20 nt, Artificial Sequence
  RPE65 RNA guide
cuauacuagaugaagcuuga

SEQ ID NO: 40279 - RNA, 20 nt, Artificial Sequence
  RPE65 RNA guide
cuauaugucuugcacauggu

SEQ ID NO: 40280 - RNA, 20 nt, Artificial Sequence
  RPE65 RNA guide
cucaaacuuaugguuucagg

SEQ ID NO: 40281 - RNA, 20 nt, Artificial Sequence
  RPE65 RNA guide
cucaacuggaggacauucac

SEQ ID NO: 40282 - RNA, 20 nt, Artificial Sequence
  RPE65 RNA guide
cucaaggugaaagaggguag

SEQ ID NO: 40283 - RNA, 20 nt, Artificial Sequence
  RPE65 RNA guide
cucagaccuagggacaaagg

SEQ ID NO: 40284 - RNA, 20 nt, Artificial Sequence
  RPE65 RNA guide
cucauacaguaccaugugca

SEQ ID NO: 40285 - RNA, 20 nt, Artificial Sequence
  RPE65 RNA guide
cucauccuaagugcacuucu

SEQ ID NO: 40286 - RNA, 20 nt, Artificial Sequence
  RPE65 RNA guide
cucaugugucugaaucugga

SEQ ID NO: 40287 - RNA, 20 nt, Artificial Sequence
  RPE65 RNA guide
cuccagauucagacacauga

SEQ ID NO: 40288 - RNA, 20 nt, Artificial Sequence
  RPE65 RNA guide
cuccaguugagagaaggaag

SEQ ID NO: 40289 - RNA, 20 nt, Artificial Sequence
  RPE65 RNA guide
cucucaacuggaggacauuc

SEQ ID NO: 40290 - RNA, 20 nt, Artificial Sequence
  RPE65 RNA guide
cucucauccuaagugcacuu

SEQ ID NO: 40291 - RNA, 20 nt, Artificial Sequence
  RPE65 RNA guide
cucucuggauucuacccucu

SEQ ID NO: 40292 - RNA, 20 nt, Artificial Sequence
  RPE65 RNA guide
cucuggauucuacccucuuu

SEQ ID NO: 40293 - RNA, 20 nt, Artificial Sequence
  RPE65 RNA guide
cucuuucaccuugaguuccc

SEQ ID NO: 40294 - RNA, 20 nt, Artificial Sequence
  RPE65 RNA guide
cucuuucuucccaucucucu

SEQ ID NO: 40295 - RNA, 20 nt, Artificial Sequence
  RPE65 RNA guide
cugaaaccauaaguuugagu

SEQ ID NO: 40296 - RNA, 20 nt, Artificial Sequence
  RPE65 RNA guide
cugaaagggacuucaagcuu

SEQ ID NO: 40297 - RNA, 20 nt, Artificial Sequence
  RPE65 RNA guide
cugaaucuggaguuaccugu

SEQ ID NO: 40298 - RNA, 20 nt, Artificial Sequence
  RPE65 RNA guide
cugaggacucaaacuuaugg

SEQ ID NO: 40299 - RNA, 20 nt, Artificial Sequence
  RPE65 RNA guide
cugaggucaucacuaccccu

SEQ ID NO: 40300 - RNA, 20 nt, Artificial Sequence
  RPE65 RNA guide
cugcaugaaggugggaacuc

SEQ ID NO: 40301 - RNA, 20 nt, Artificial Sequence
  RPE65 RNA guide
cuggaggacauucacuuuac

SEQ ID NO: 40302 - RNA, 20 nt, Artificial Sequence
  RPE65 RNA guide
cuggaguuaccugugacauc

SEQ ID NO: 40303 - RNA, 20 nt, Artificial Sequence
  RPE65 RNA guide
cuggauucuacccucuuuca

SEQ ID NO: 40304 - RNA, 20 nt, Artificial Sequence
  RPE65 RNA guide
cugguuaguuacuuuucuuu

SEQ ID NO: 40305 - RNA, 20 nt, Artificial Sequence
  RPE65 RNA guide
cuguaugaguuuggaacuga

SEQ ID NO: 40306 - RNA, 20 nt, Artificial Sequence
  RPE65 RNA guide
cugugacaucucuuuauuug

SEQ ID NO: 40307 - RNA, 20 nt, Artificial Sequence
  RPE65 RNA guide
cuuaggaugagaguucaagg

SEQ ID NO: 40308 - RNA, 20 nt, Artificial Sequence
  RPE65 RNA guide
cuuaugguuucaggucaauc

SEQ ID NO: 40309 - RNA, 20 nt, Artificial Sequence
  RPE65 RNA guide
cuucaagcuucaucuaguau

SEQ ID NO: 40310 - RNA, 20 nt, Artificial Sequence
  RPE65 RNA guide
cuucaugcagaacauaaugc

SEQ ID NO: 40311 - RNA, 20 nt, Artificial Sequence
  RPE65 RNA guide
cuucccaucucucuggauuc

SEQ ID NO: 40312 - RNA, 20 nt, Artificial Sequence
  RPE65 RNA guide
cuuccuucucucaacuggag

SEQ ID NO: 40313 - RNA, 20 nt, Artificial Sequence
  RPE65 RNA guide
cuucucucaacuggaggaca

SEQ ID NO: 40314 - RNA, 20 nt, Artificial Sequence
  RPE65 RNA guide
cuucucuuucuucccaucuc

SEQ ID NO: 40315 - RNA, 20 nt, Artificial Sequence
  RPE65 RNA guide
cuugaacucucauccuaagu

SEQ ID NO: 40316 - RNA, 20 nt, Artificial Sequence
  RPE65 RNA guide
cuugaagucccuuucaguuc

SEQ ID NO: 40317 - RNA, 20 nt, Artificial Sequence
  RPE65 RNA guide
cuugaguucccaccuucaug

SEQ ID NO: 40318 - RNA, 20 nt, Artificial Sequence
  RPE65 RNA guide
cuugcacaugguacuguaug

SEQ ID NO: 40319 - RNA, 20 nt, Artificial Sequence
  RPE65 RNA guide
cuuucaccuugaguucccac

SEQ ID NO: 40320 - RNA, 20 nt, Artificial Sequence
  RPE65 RNA guide
cuuucaguuccaaacucaua

SEQ ID NO: 40321 - RNA, 20 nt, Artificial Sequence
  RPE65 RNA guide
cuuucuauacuagaugaagc

SEQ ID NO: 40322 - RNA, 20 nt, Artificial Sequence
  RPE65 RNA guide
cuuucuucccaucucucugg

SEQ ID NO: 40323 - RNA, 20 nt, Artificial Sequence
  RPE65 RNA guide
cuuugucccuaggucugagg

SEQ ID NO: 40324 - RNA, 20 nt, Artificial Sequence
  RPE65 RNA guide
cuuuuagcauaugcagauug

SEQ ID NO: 40325 - RNA, 20 nt, Artificial Sequence
  RPE65 RNA guide
gaaaaguaacuaaccagagc

SEQ ID NO: 40326 - RNA, 20 nt, Artificial Sequence
  RPE65 RNA guide
gaaaccauaaguuugagucc

SEQ ID NO: 40327 - RNA, 20 nt, Artificial Sequence
  RPE65 RNA guide
gaaagagaagugcacuuagg

SEQ ID NO: 40328 - RNA, 20 nt, Artificial Sequence
  RPE65 RNA guide
gaaagaggguagaauccaga

SEQ ID NO: 40329 - RNA, 20 nt, Artificial Sequence
  RPE65 RNA guide
gaaagggacuucaagcuuca

SEQ ID NO: 40330 - RNA, 20 nt, Artificial Sequence
  RPE65 RNA guide
gaacauaaugcccccucaug

SEQ ID NO: 40331 - RNA, 20 nt, Artificial Sequence
  RPE65 RNA guide
gaacucaaggugaaagaggg

SEQ ID NO: 40332 - RNA, 20 nt, Artificial Sequence
  RPE65 RNA guide
gaacucucauccuaagugca

SEQ ID NO: 40333 - RNA, 20 nt, Artificial Sequence
  RPE65 RNA guide
gaacugaaagggacuucaag

SEQ ID NO: 40334 - RNA, 20 nt, Artificial Sequence
  RPE65 RNA guide
gaagaaagagaagugcacuu

SEQ ID NO: 40335 - RNA, 20 nt, Artificial Sequence
  RPE65 RNA guide
gaagauacauuauaccuuug

SEQ ID NO: 40336 - RNA, 20 nt, Artificial Sequence
  RPE65 RNA guide
gaagcuugaagucccuuuca

SEQ ID NO: 40337 - RNA, 20 nt, Artificial Sequence
  RPE65 RNA guide
gaaggaagauacauuauacc

SEQ ID NO: 40338 - RNA, 20 nt, Artificial Sequence
  RPE65 RNA guide
gaaggugggaacucaaggug

SEQ ID NO: 40339 - RNA, 20 nt, Artificial Sequence
  RPE65 RNA guide
gaaguaaagugaauguccuc

SEQ ID NO: 40340 - RNA, 20 nt, Artificial Sequence
  RPE65 RNA guide
gaagucccuuucaguuccaa

SEQ ID NO: 40341 - RNA, 20 nt, Artificial Sequence
  RPE65 RNA guide
gaagucugaggacucaaacu

SEQ ID NO: 40342 - RNA, 20 nt, Artificial Sequence
  RPE65 RNA guide
gaagugcacuuaggaugaga

SEQ ID NO: 40343 - RNA, 20 nt, Artificial Sequence
  RPE65 RNA guide
gaauccagagagaugggaag

SEQ ID NO: 40344 - RNA, 20 nt, Artificial Sequence
  RPE65 RNA guide
gaaucuggaguuaccuguga

SEQ ID NO: 40345 - RNA, 20 nt, Artificial Sequence
  RPE65 RNA guide
gaauguccuccaguugagag

SEQ ID NO: 40346 - RNA, 20 nt, Artificial Sequence
  RPE65 RNA guide
gacaaagguauaauguaucu

SEQ ID NO: 40347 - RNA, 20 nt, Artificial Sequence
  RPE65 RNA guide
gacacaugagggggcauuau

SEQ ID NO: 40348 - RNA, 20 nt, Artificial Sequence
  RPE65 RNA guide
gaccuagggacaaagguaua

SEQ ID NO: 40349 - RNA, 20 nt, Artificial Sequence
  RPE65 RNA guide
gaccucagaccuagggacaa

SEQ ID NO: 40350 - RNA, 20 nt, Artificial Sequence
  RPE65 RNA guide
gaccugaaaccauaaguuug

SEQ ID NO: 40351 - RNA, 20 nt, Artificial Sequence
  RPE65 RNA guide
gacucaaacuuaugguuuca

SEQ ID NO: 40352 - RNA, 20 nt, Artificial Sequence
  RPE65 RNA guide
gacuucaagcuucaucuagu

SEQ ID NO: 40353 - RNA, 20 nt, Artificial Sequence
  RPE65 RNA guide
gagaaggaagauacauuaua

SEQ ID NO: 40354 - RNA, 20 nt, Artificial Sequence
  RPE65 RNA guide
gagaagugcacuuaggauga

SEQ ID NO: 40355 - RNA, 20 nt, Artificial Sequence
  RPE65 RNA guide
gagagaaggaagauacauua

SEQ ID NO: 40356 - RNA, 20 nt, Artificial Sequence
  RPE65 RNA guide
gagagaugggaagaaagaga

SEQ ID NO: 40357 - RNA, 20 nt, Artificial Sequence
  RPE65 RNA guide
gagaguucaagggguaguga

SEQ ID NO: 40358 - RNA, 20 nt, Artificial Sequence
  RPE65 RNA guide
gagaugggaagaaagagaag

SEQ ID NO: 40359 - RNA, 20 nt, Artificial Sequence
  RPE65 RNA guide
gagaugucacagguaacucc

SEQ ID NO: 40360 - RNA, 20 nt, Artificial Sequence
  RPE65 RNA guide
gagcacuguaugguauacau

SEQ ID NO: 40361 - RNA, 20 nt, Artificial Sequence
  RPE65 RNA guide
gaggacauucacuuuacuuc

SEQ ID NO: 40362 - RNA, 20 nt, Artificial Sequence
  RPE65 RNA guide
gaggacucaaacuuaugguu

SEQ ID NO: 40363 - RNA, 20 nt, Artificial Sequence
  RPE65 RNA guide
gagggggcauuauguucugc

SEQ ID NO: 40364 - RNA, 20 nt, Artificial Sequence
  RPE65 RNA guide
gaggguagaauccagagaga

SEQ ID NO: 40365 - RNA, 20 nt, Artificial Sequence
  RPE65 RNA guide
gaggucaucacuaccccuug

SEQ ID NO: 40366 - RNA, 20 nt, Artificial Sequence
  RPE65 RNA guide
gaguauaaagaagucugagg

SEQ ID NO: 40367 - RNA, 20 nt, Artificial Sequence
  RPE65 RNA guide
gaguccucagacuucuuuau

SEQ ID NO: 40368 - RNA, 20 nt, Artificial Sequence
  RPE65 RNA guide
gaguuaccugugacaucucu

SEQ ID NO: 40369 - RNA, 20 nt, Artificial Sequence
  RPE65 RNA guide
gaguucaagggguagugaug

SEQ ID NO: 40370 - RNA, 20 nt, Artificial Sequence
  RPE65 RNA guide
gaguucccaccuucaugcag

SEQ ID NO: 40371 - RNA, 20 nt, Artificial Sequence
  RPE65 RNA guide
gaguuuggaacugaaaggga

SEQ ID NO: 40372 - RNA, 20 nt, Artificial Sequence
  RPE65 RNA guide
gauacauuauaccuuugucc

SEQ ID NO: 40373 - RNA, 20 nt, Artificial Sequence
  RPE65 RNA guide
gaugaagcuugaagucccuu

SEQ ID NO: 40374 - RNA, 20 nt, Artificial Sequence
  RPE65 RNA guide
gaugaccucagaccuaggga

SEQ ID NO: 40375 - RNA, 20 nt, Artificial Sequence
  RPE65 RNA guide
gaugagaguucaagggguag

SEQ ID NO: 40376 - RNA, 20 nt, Artificial Sequence
  RPE65 RNA guide
gaugggaagaaagagaagug

SEQ ID NO: 40377 - RNA, 20 nt, Artificial Sequence
  RPE65 RNA guide
gauguauaccauacagugcu

SEQ ID NO: 40378 - RNA, 20 nt, Artificial Sequence
  RPE65 RNA guide
gaugucacagguaacuccag

SEQ ID NO: 40379 - RNA, 20 nt, Artificial Sequence
  RPE65 RNA guide
gauucagacacaugaggggg

SEQ ID NO: 40380 - RNA, 20 nt, Artificial Sequence
  RPE65 RNA guide
gauucuacccucuuucaccu

SEQ ID NO: 40381 - RNA, 20 nt, Artificial Sequence
  RPE65 RNA guide
gauugaccugaaaccauaag

SEQ ID NO: 40382 - RNA, 20 nt, Artificial Sequence
  RPE65 RNA guide
gcaagacauauaguugguau

SEQ ID NO: 40383 - RNA, 20 nt, Artificial Sequence
  RPE65 RNA guide
gcacaugguacuguaugagu

SEQ ID NO: 40384 - RNA, 20 nt, Artificial Sequence
  RPE65 RNA guide
gcacuguaugguauacauca

SEQ ID NO: 40385 - RNA, 20 nt, Artificial Sequence
  RPE65 RNA guide
gcacuuaggaugagaguuca

SEQ ID NO: 40386 - RNA, 20 nt, Artificial Sequence
  RPE65 RNA guide
gcacuucucuuucuucccau

SEQ ID NO: 40387 - RNA, 20 nt, Artificial Sequence
  RPE65 RNA guide
gcagaacauaaugcccccuc

SEQ ID NO: 40388 - RNA, 20 nt, Artificial Sequence
  RPE65 RNA guide
gcagauugaccugaaaccau

SEQ ID NO: 40389 - RNA, 20 nt, Artificial Sequence
  RPE65 RNA guide
gcauaugcagauugaccuga

SEQ ID NO: 40390 - RNA, 20 nt, Artificial Sequence
  RPE65 RNA guide
gcaugaaggugggaacucaa

SEQ ID NO: 40391 - RNA, 20 nt, Artificial Sequence
  RPE65 RNA guide
gcauuauguucugcaugaag

SEQ ID NO: 40392 - RNA, 20 nt, Artificial Sequence
  RPE65 RNA guide
gcccccucaugugucugaau

SEQ ID NO: 40393 - RNA, 20 nt, Artificial Sequence
  RPE65 RNA guide
gcuaaaagaaaaguaacuaa

SEQ ID NO: 40394 - RNA, 20 nt, Artificial Sequence
  RPE65 RNA guide
gcucugguuaguuacuuuuc

SEQ ID NO: 40395 - RNA, 20 nt, Artificial Sequence
  RPE65 RNA guide
gcuugaagucccuuucaguu

SEQ ID NO: 40396 - RNA, 20 nt, Artificial Sequence
  RPE65 RNA guide
ggaacucaaggugaaagagg

SEQ ID NO: 40397 - RNA, 20 nt, Artificial Sequence
  RPE65 RNA guide
ggaacugaaagggacuucaa

SEQ ID NO: 40398 - RNA, 20 nt, Artificial Sequence
  RPE65 RNA guide
ggaagaaagagaagugcacu

SEQ ID NO: 40399 - RNA, 20 nt, Artificial Sequence
  RPE65 RNA guide
ggaagauacauuauaccuuu

SEQ ID NO: 40400 - RNA, 20 nt, Artificial Sequence
  RPE65 RNA guide
ggaaguaaagugaauguccu

SEQ ID NO: 40401 - RNA, 20 nt, Artificial Sequence
  RPE65 RNA guide
ggacaaagguauaauguauc

SEQ ID NO: 40402 - RNA, 20 nt, Artificial Sequence
  RPE65 RNA guide
ggacucaaacuuaugguuuc

SEQ ID NO: 40403 - RNA, 20 nt, Artificial Sequence
  RPE65 RNA guide
ggacuucaagcuucaucuag

SEQ ID NO: 40404 - RNA, 20 nt, Artificial Sequence
  RPE65 RNA guide
ggaggacauucacuuuacuu

SEQ ID NO: 40405 - RNA, 20 nt, Artificial Sequence
  RPE65 RNA guide
ggaguuaccugugacaucuc

SEQ ID NO: 40406 - RNA, 20 nt, Artificial Sequence
  RPE65 RNA guide
ggaugagaguucaaggggua

SEQ ID NO: 40407 - RNA, 20 nt, Artificial Sequence
  RPE65 RNA guide
ggauucuacccucuuucacc

SEQ ID NO: 40408 - RNA, 20 nt, Artificial Sequence
  RPE65 RNA guide
ggcauuauguucugcaugaa

SEQ ID NO: 40409 - RNA, 20 nt, Artificial Sequence
  RPE65 RNA guide
gggaacucaaggugaaagag

SEQ ID NO: 40410 - RNA, 20 nt, Artificial Sequence
  RPE65 RNA guide
gggaagaaagagaagugcac

SEQ ID NO: 40411 - RNA, 20 nt, Artificial Sequence
  RPE65 RNA guide
gggacaaagguauaauguau

SEQ ID NO: 40412 - RNA, 20 nt, Artificial Sequence
  RPE65 RNA guide
gggacuucaagcuucaucua

SEQ ID NO: 40413 - RNA, 20 nt, Artificial Sequence
  RPE65 RNA guide
gggcauuauguucugcauga

SEQ ID NO: 40414 - RNA, 20 nt, Artificial Sequence
  RPE65 RNA guide
ggggcauuauguucugcaug

SEQ ID NO: 40415 - RNA, 20 nt, Artificial Sequence
  RPE65 RNA guide
gggggcauuauguucugcau

SEQ ID NO: 40416 - RNA, 20 nt, Artificial Sequence
  RPE65 RNA guide
gggguagugaugaccucaga

SEQ ID NO: 40417 - RNA, 20 nt, Artificial Sequence
  RPE65 RNA guide
ggguagaauccagagagaug

SEQ ID NO: 40418 - RNA, 20 nt, Artificial Sequence
  RPE65 RNA guide
ggguagugaugaccucagac

SEQ ID NO: 40419 - RNA, 20 nt, Artificial Sequence
  RPE65 RNA guide
gguaacuccagauucagaca

SEQ ID NO: 40420 - RNA, 20 nt, Artificial Sequence
  RPE65 RNA guide
gguacuguaugaguuuggaa

SEQ ID NO: 40421 - RNA, 20 nt, Artificial Sequence
  RPE65 RNA guide
gguagaauccagagagaugg

SEQ ID NO: 40422 - RNA, 20 nt, Artificial Sequence
  RPE65 RNA guide
gguagugaugaccucagacc

SEQ ID NO: 40423 - RNA, 20 nt, Artificial Sequence
  RPE65 RNA guide
gguauaauguaucuuccuuc

SEQ ID NO: 40424 - RNA, 20 nt, Artificial Sequence
  RPE65 RNA guide
gguauuuacauaguaccaua

SEQ ID NO: 40425 - RNA, 20 nt, Artificial Sequence
  RPE65 RNA guide
ggucaaucugcauaugcuaa

SEQ ID NO: 40426 - RNA, 20 nt, Artificial Sequence
  RPE65 RNA guide
ggucaucacuaccccuugaa

SEQ ID NO: 40427 - RNA, 20 nt, Artificial Sequence
  RPE65 RNA guide
ggucugaggucaucacuacc

SEQ ID NO: 40428 - RNA, 20 nt, Artificial Sequence
  RPE65 RNA guide
ggugaaagaggguagaaucc

SEQ ID NO: 40429 - RNA, 20 nt, Artificial Sequence
  RPE65 RNA guide
ggugggaacucaaggugaaa

SEQ ID NO: 40430 - RNA, 20 nt, Artificial Sequence
  RPE65 RNA guide
gguuucaggucaaucugcau

SEQ ID NO: 40431 - RNA, 20 nt, Artificial Sequence
  RPE65 RNA guide
guaaagugaauguccuccag

SEQ ID NO: 40432 - RNA, 20 nt, Artificial Sequence
  RPE65 RNA guide
guaaauaccaacuauauguc

SEQ ID NO: 40433 - RNA, 20 nt, Artificial Sequence
  RPE65 RNA guide
guaacuaaccagagcacugu

SEQ ID NO: 40434 - RNA, 20 nt, Artificial Sequence
  RPE65 RNA guide
guaacuccagauucagacac

SEQ ID NO: 40435 - RNA, 20 nt, Artificial Sequence
  RPE65 RNA guide
guaccaugugcaagacauau

SEQ ID NO: 40436 - RNA, 20 nt, Artificial Sequence
  RPE65 RNA guide
guacuguaugaguuuggaac

SEQ ID NO: 40437 - RNA, 20 nt, Artificial Sequence
  RPE65 RNA guide
guagaauccagagagauggg

SEQ ID NO: 40438 - RNA, 20 nt, Artificial Sequence
  RPE65 RNA guide
guagugaugaccucagaccu

SEQ ID NO: 40439 - RNA, 20 nt, Artificial Sequence
  RPE65 RNA guide
guauaaagaagucugaggac

SEQ ID NO: 40440 - RNA, 20 nt, Artificial Sequence
  RPE65 RNA guide
guauaauguaucuuccuucu

SEQ ID NO: 40441 - RNA, 20 nt, Artificial Sequence
  RPE65 RNA guide
guauaccauacagugcucug

SEQ ID NO: 40442 - RNA, 20 nt, Artificial Sequence
  RPE65 RNA guide
guaucuuccuucucucaacu

SEQ ID NO: 40443 - RNA, 20 nt, Artificial Sequence
  RPE65 RNA guide
guaugaguuuggaacugaaa

SEQ ID NO: 40444 - RNA, 20 nt, Artificial Sequence
  RPE65 RNA guide
guaugguacuauguaaauac

SEQ ID NO: 40445 - RNA, 20 nt, Artificial Sequence
  RPE65 RNA guide
gucaaucugcauaugcuaaa

SEQ ID NO: 40446 - RNA, 20 nt, Artificial Sequence
  RPE65 RNA guide
gucaauuucguaugguacua

SEQ ID NO: 40447 - RNA, 20 nt, Artificial Sequence
  RPE65 RNA guide
gucacagguaacuccagauu

SEQ ID NO: 40448 - RNA, 20 nt, Artificial Sequence
  RPE65 RNA guide
gucaucacuaccccuugaac

SEQ ID NO: 40449 - RNA, 20 nt, Artificial Sequence
  RPE65 RNA guide
gucccuaggucugaggucau

SEQ ID NO: 40450 - RNA, 20 nt, Artificial Sequence
  RPE65 RNA guide
gucccuuucaguuccaaacu

SEQ ID NO: 40451 - RNA, 20 nt, Artificial Sequence
  RPE65 RNA guide
guccucagacuucuuuauac

SEQ ID NO: 40452 - RNA, 20 nt, Artificial Sequence
  RPE65 RNA guide
guccuccaguugagagaagg

SEQ ID NO: 40453 - RNA, 20 nt, Artificial Sequence
  RPE65 RNA guide
gucugaaucuggaguuaccu

SEQ ID NO: 40454 - RNA, 20 nt, Artificial Sequence
  RPE65 RNA guide
gucugaggacucaaacuuau

SEQ ID NO: 40455 - RNA, 20 nt, Artificial Sequence
  RPE65 RNA guide
gucugaggucaucacuaccc

SEQ ID NO: 40456 - RNA, 20 nt, Artificial Sequence
  RPE65 RNA guide
gucuugcacaugguacugua

SEQ ID NO: 40457 - RNA, 20 nt, Artificial Sequence
  RPE65 RNA guide
gugaaagaggguagaaucca

SEQ ID NO: 40458 - RNA, 20 nt, Artificial Sequence
  RPE65 RNA guide
gugaauguccuccaguugag

SEQ ID NO: 40459 - RNA, 20 nt, Artificial Sequence
  RPE65 RNA guide
gugaugaccucagaccuagg

SEQ ID NO: 40460 - RNA, 20 nt, Artificial Sequence
  RPE65 RNA guide
gugcaagacauauaguuggu

SEQ ID NO: 40461 - RNA, 20 nt, Artificial Sequence
  RPE65 RNA guide
gugcacuuaggaugagaguu

SEQ ID NO: 40462 - RNA, 20 nt, Artificial Sequence
  RPE65 RNA guide
gugcacuucucuuucuuccc

SEQ ID NO: 40463 - RNA, 20 nt, Artificial Sequence
  RPE65 RNA guide
gugcucugguuaguuacuuu

SEQ ID NO: 40464 - RNA, 20 nt, Artificial Sequence
  RPE65 RNA guide
gugggaacucaaggugaaag

SEQ ID NO: 40465 - RNA, 20 nt, Artificial Sequence
  RPE65 RNA guide
gugucugaaucuggaguuac

SEQ ID NO: 40466 - RNA, 20 nt, Artificial Sequence
  RPE65 RNA guide
guuaccugugacaucucuuu

SEQ ID NO: 40467 - RNA, 20 nt, Artificial Sequence
  RPE65 RNA guide
guucaagggguagugaugac

SEQ ID NO: 40468 - RNA, 20 nt, Artificial Sequence
  RPE65 RNA guide
guuccaaacucauacaguac

SEQ ID NO: 40469 - RNA, 20 nt, Artificial Sequence
  RPE65 RNA guide
guucccaccuucaugcagaa

SEQ ID NO: 40470 - RNA, 20 nt, Artificial Sequence
  RPE65 RNA guide
guucugcaugaaggugggaa

SEQ ID NO: 40471 - RNA, 20 nt, Artificial Sequence
  RPE65 RNA guide
guugagagaaggaagauaca

SEQ ID NO: 40472 - RNA, 20 nt, Artificial Sequence
  RPE65 RNA guide
guugguauuuacauaguacc

SEQ ID NO: 40473 - RNA, 20 nt, Artificial Sequence
  RPE65 RNA guide
guuucaggucaaucugcaua

SEQ ID NO: 40474 - RNA, 20 nt, Artificial Sequence
  RPE65 RNA guide
guuugaguccucagacuucu

SEQ ID NO: 40475 - RNA, 20 nt, Artificial Sequence
  RPE65 RNA guide
guuuggaacugaaagggacu

SEQ ID NO: 40476 - RNA, 20 nt, Artificial Sequence
  RPE65 RNA guide
uaaagaagucugaggacuca

SEQ ID NO: 40477 - RNA, 20 nt, Artificial Sequence
  RPE65 RNA guide
uaaagagaugucacagguaa

SEQ ID NO: 40478 - RNA, 20 nt, Artificial Sequence
  RPE65 RNA guide
uaaagugaauguccuccagu

SEQ ID NO: 40479 - RNA, 20 nt, Artificial Sequence
  RPE65 RNA guide
uaaccagagcacuguauggu

SEQ ID NO: 40480 - RNA, 20 nt, Artificial Sequence
  RPE65 RNA guide
uaacuaaccagagcacugua

SEQ ID NO: 40481 - RNA, 20 nt, Artificial Sequence
  RPE65 RNA guide
uaacuccagauucagacaca

SEQ ID NO: 40482 - RNA, 20 nt, Artificial Sequence
  RPE65 RNA guide
uaagaguauaaagaagucug

SEQ ID NO: 40483 - RNA, 20 nt, Artificial Sequence
  RPE65 RNA guide
uaagugcacuucucuuucuu

SEQ ID NO: 40484 - RNA, 20 nt, Artificial Sequence
  RPE65 RNA guide
uaaguuugaguccucagacu

SEQ ID NO: 40485 - RNA, 20 nt, Artificial Sequence
  RPE65 RNA guide
uaaugcccccucaugugucu

SEQ ID NO: 40486 - RNA, 20 nt, Artificial Sequence
  RPE65 RNA guide
uaauguaucuuccuucucuc

SEQ ID NO: 40487 - RNA, 20 nt, Artificial Sequence
  RPE65 RNA guide
uacaguaccaugugcaagac

SEQ ID NO: 40488 - RNA, 20 nt, Artificial Sequence
  RPE65 RNA guide
uacagugcucugguuaguua

SEQ ID NO: 40489 - RNA, 20 nt, Artificial Sequence
  RPE65 RNA guide
uacauaguaccauacgaaau

SEQ ID NO: 40490 - RNA, 20 nt, Artificial Sequence
  RPE65 RNA guide
uacauuauaccuuugucccu

SEQ ID NO: 40491 - RNA, 20 nt, Artificial Sequence
  RPE65 RNA guide
uaccaacuauaugucuugca

SEQ ID NO: 40492 - RNA, 20 nt, Artificial Sequence
  RPE65 RNA guide
uaccauacagugcucugguu

SEQ ID NO: 40493 - RNA, 20 nt, Artificial Sequence
  RPE65 RNA guide
uaccaugugcaagacauaua

SEQ ID NO: 40494 - RNA, 20 nt, Artificial Sequence
  RPE65 RNA guide
uaccccuugaacucucaucc

SEQ ID NO: 40495 - RNA, 20 nt, Artificial Sequence
  RPE65 RNA guide
uacccucuuucaccuugagu

SEQ ID NO: 40496 - RNA, 20 nt, Artificial Sequence
  RPE65 RNA guide
uaccugugacaucucuuuau

SEQ ID NO: 40497 - RNA, 20 nt, Artificial Sequence
  RPE65 RNA guide
uaccuuugucccuaggucug

SEQ ID NO: 40498 - RNA, 20 nt, Artificial Sequence
  RPE65 RNA guide
uacggaaguaaagugaaugu

SEQ ID NO: 40499 - RNA, 20 nt, Artificial Sequence
  RPE65 RNA guide
uacuagaugaagcuugaagu

SEQ ID NO: 40500 - RNA, 20 nt, Artificial Sequence
  RPE65 RNA guide
uacuguaugaguuuggaacu

SEQ ID NO: 40501 - RNA, 20 nt, Artificial Sequence
  RPE65 RNA guide
uagaauccagagagauggga

SEQ ID NO: 40502 - RNA, 20 nt, Artificial Sequence
  RPE65 RNA guide
uagaugaagcuugaaguccc

SEQ ID NO: 40503 - RNA, 20 nt, Artificial Sequence
  RPE65 RNA guide
uagcauaugcagauugaccu

SEQ ID NO: 40504 - RNA, 20 nt, Artificial Sequence
  RPE65 RNA guide
uaggaugagaguucaagggg

SEQ ID NO: 40505 - RNA, 20 nt, Artificial Sequence
  RPE65 RNA guide
uagggacaaagguauaaugu

SEQ ID NO: 40506 - RNA, 20 nt, Artificial Sequence
  RPE65 RNA guide
uaggucugaggucaucacua

SEQ ID NO: 40507 - RNA, 20 nt, Artificial Sequence
  RPE65 RNA guide
uagugaugaccucagaccua

SEQ ID NO: 40508 - RNA, 20 nt, Artificial Sequence
  RPE65 RNA guide
uauaaagaagucugaggacu

SEQ ID NO: 40509 - RNA, 20 nt, Artificial Sequence
  RPE65 RNA guide
uauaccauacagugcucugg

SEQ ID NO: 40510 - RNA, 20 nt, Artificial Sequence
  RPE65 RNA guide
uauaccuuugucccuagguc

SEQ ID NO: 40511 - RNA, 20 nt, Artificial Sequence
  RPE65 RNA guide
uauacuagaugaagcuugaa

SEQ ID NO: 40512 - RNA, 20 nt, Artificial Sequence
  RPE65 RNA guide
uauaugucuugcacauggua

SEQ ID NO: 40513 - RNA, 20 nt, Artificial Sequence
  RPE65 RNA guide
uaucuuccuucucucaacug

SEQ ID NO: 40514 - RNA, 20 nt, Artificial Sequence
  RPE65 RNA guide
uaugaguuuggaacugaaag

SEQ ID NO: 40515 - RNA, 20 nt, Artificial Sequence
  RPE65 RNA guide
uaugcagauugaccugaaac

SEQ ID NO: 40516 - RNA, 20 nt, Artificial Sequence
  RPE65 RNA guide
uaugguuucaggucaaucug

SEQ ID NO: 40517 - RNA, 20 nt, Artificial Sequence
  RPE65 RNA guide
uaugucuugcacaugguacu

SEQ ID NO: 40518 - RNA, 20 nt, Artificial Sequence
  RPE65 RNA guide
uauguucugcaugaaggugg

SEQ ID NO: 40519 - RNA, 20 nt, Artificial Sequence
  RPE65 RNA guide
uauuugauguauaccauaca

SEQ ID NO: 40520 - RNA, 20 nt, Artificial Sequence
  RPE65 RNA guide
ucaaacuuaugguuucaggu

SEQ ID NO: 40521 - RNA, 20 nt, Artificial Sequence
  RPE65 RNA guide
ucaaauaaagagaugucaca

SEQ ID NO: 40522 - RNA, 20 nt, Artificial Sequence
  RPE65 RNA guide
ucaacuggaggacauucacu

SEQ ID NO: 40523 - RNA, 20 nt, Artificial Sequence
  RPE65 RNA guide
ucaagcuucaucuaguauag

SEQ ID NO: 40524 - RNA, 20 nt, Artificial Sequence
  RPE65 RNA guide
ucaagggguagugaugaccu

SEQ ID NO: 40525 - RNA, 20 nt, Artificial Sequence
  RPE65 RNA guide
ucaaggugaaagaggguaga

SEQ ID NO: 40526 - RNA, 20 nt, Artificial Sequence
  RPE65 RNA guide
ucacagguaacuccagauuc

SEQ ID NO: 40527 - RNA, 20 nt, Artificial Sequence
  RPE65 RNA guide
ucaccuugaguucccaccuu

SEQ ID NO: 40528 - RNA, 20 nt, Artificial Sequence
  RPE65 RNA guide
ucacuaccccuugaacucuc

SEQ ID NO: 40529 - RNA, 20 nt, Artificial Sequence
  RPE65 RNA guide
ucagacacaugagggggcau

SEQ ID NO: 40530 - RNA, 20 nt, Artificial Sequence
  RPE65 RNA guide
ucagaccuagggacaaaggu

SEQ ID NO: 40531 - RNA, 20 nt, Artificial Sequence
  RPE65 RNA guide
ucaggucaaucugcauaugc

SEQ ID NO: 40532 - RNA, 20 nt, Artificial Sequence
  RPE65 RNA guide
ucaguuccaaacucauacag

SEQ ID NO: 40533 - RNA, 20 nt, Artificial Sequence
  RPE65 RNA guide
ucauacaguaccaugugcaa

SEQ ID NO: 40534 - RNA, 20 nt, Artificial Sequence
  RPE65 RNA guide
ucaucacuaccccuugaacu

SEQ ID NO: 40535 - RNA, 20 nt, Artificial Sequence
  RPE65 RNA guide
ucauccuaagugcacuucuc

SEQ ID NO: 40536 - RNA, 20 nt, Artificial Sequence
  RPE65 RNA guide
ucaugcagaacauaaugccc

SEQ ID NO: 40537 - RNA, 20 nt, Artificial Sequence
  RPE65 RNA guide
ucaugugucugaaucuggag

SEQ ID NO: 40538 - RNA, 20 nt, Artificial Sequence
  RPE65 RNA guide
uccaaaaaugucaauuucgu

SEQ ID NO: 40539 - RNA, 20 nt, Artificial Sequence
  RPE65 RNA guide
uccaaacucauacaguacca

SEQ ID NO: 40540 - RNA, 20 nt, Artificial Sequence
  RPE65 RNA guide
uccagagagaugggaagaaa

SEQ ID NO: 40541 - RNA, 20 nt, Artificial Sequence
  RPE65 RNA guide
uccagauucagacacaugag

SEQ ID NO: 40542 - RNA, 20 nt, Artificial Sequence
  RPE65 RNA guide
uccaguugagagaaggaaga

SEQ ID NO: 40543 - RNA, 20 nt, Artificial Sequence
  RPE65 RNA guide
ucccaccuucaugcagaaca

SEQ ID NO: 40544 - RNA, 20 nt, Artificial Sequence
  RPE65 RNA guide
ucccaucucucuggauucua

SEQ ID NO: 40545 - RNA, 20 nt, Artificial Sequence
  RPE65 RNA guide
ucccuaggucugaggucauc

SEQ ID NO: 40546 - RNA, 20 nt, Artificial Sequence
  RPE65 RNA guide
ucccuuucaguuccaaacuc

SEQ ID NO: 40547 - RNA, 20 nt, Artificial Sequence
  RPE65 RNA guide
uccuaagugcacuucucuuu

SEQ ID NO: 40548 - RNA, 20 nt, Artificial Sequence
  RPE65 RNA guide
uccucagacuucuuuauacu

SEQ ID NO: 40549 - RNA, 20 nt, Artificial Sequence
  RPE65 RNA guide
uccuccaguugagagaagga

SEQ ID NO: 40550 - RNA, 20 nt, Artificial Sequence
  RPE65 RNA guide
uccuucucucaacuggagga

SEQ ID NO: 40551 - RNA, 20 nt, Artificial Sequence
  RPE65 RNA guide
ucguaugguacuauguaaau

SEQ ID NO: 40552 - RNA, 20 nt, Artificial Sequence
  RPE65 RNA guide
ucuacccucuuucaccuuga

SEQ ID NO: 40553 - RNA, 20 nt, Artificial Sequence
  RPE65 RNA guide
ucuauacuagaugaagcuug

SEQ ID NO: 40554 - RNA, 20 nt, Artificial Sequence
  RPE65 RNA guide
ucucaacuggaggacauuca

SEQ ID NO: 40555 - RNA, 20 nt, Artificial Sequence
  RPE65 RNA guide
ucucauccuaagugcacuuc

SEQ ID NO: 40556 - RNA, 20 nt, Artificial Sequence
  RPE65 RNA guide
ucucucaacuggaggacauu

SEQ ID NO: 40557 - RNA, 20 nt, Artificial Sequence
  RPE65 RNA guide
ucucucuggauucuacccuc

SEQ ID NO: 40558 - RNA, 20 nt, Artificial Sequence
  RPE65 RNA guide
ucucuggauucuacccucuu

SEQ ID NO: 40559 - RNA, 20 nt, Artificial Sequence
  RPE65 RNA guide
ucucuuucuucccaucucuc

SEQ ID NO: 40560 - RNA, 20 nt, Artificial Sequence
  RPE65 RNA guide
ucugaaucuggaguuaccug

SEQ ID NO: 40561 - RNA, 20 nt, Artificial Sequence
  RPE65 RNA guide
ucugaggacucaaacuuaug

SEQ ID NO: 40562 - RNA, 20 nt, Artificial Sequence
  RPE65 RNA guide
ucugaggucaucacuacccc

SEQ ID NO: 40563 - RNA, 20 nt, Artificial Sequence
  RPE65 RNA guide
ucugcaugaaggugggaacu

SEQ ID NO: 40564 - RNA, 20 nt, Artificial Sequence
  RPE65 RNA guide
ucuggaguuaccugugacau

SEQ ID NO: 40565 - RNA, 20 nt, Artificial Sequence
  RPE65 RNA guide
ucuggauucuacccucuuuc

SEQ ID NO: 40566 - RNA, 20 nt, Artificial Sequence
  RPE65 RNA guide
ucuucccaucucucuggauu

SEQ ID NO: 40567 - RNA, 20 nt, Artificial Sequence
  RPE65 RNA guide
ucuuccuucucucaacugga

SEQ ID NO: 40568 - RNA, 20 nt, Artificial Sequence
  RPE65 RNA guide
ucuugcacaugguacuguau

SEQ ID NO: 40569 - RNA, 20 nt, Artificial Sequence
  RPE65 RNA guide
ucuuucaccuugaguuccca

SEQ ID NO: 40570 - RNA, 20 nt, Artificial Sequence
  RPE65 RNA guide
ucuuucuucccaucucucug

SEQ ID NO: 40571 - RNA, 20 nt, Artificial Sequence
  RPE65 RNA guide
ucuuuuagcauaugcagauu

SEQ ID NO: 40572 - RNA, 20 nt, Artificial Sequence
  RPE65 RNA guide
ugaaaccauaaguuugaguc

SEQ ID NO: 40573 - RNA, 20 nt, Artificial Sequence
  RPE65 RNA guide
ugaaagaggguagaauccag

SEQ ID NO: 40574 - RNA, 20 nt, Artificial Sequence
  RPE65 RNA guide
ugaaagggacuucaagcuuc

SEQ ID NO: 40575 - RNA, 20 nt, Artificial Sequence
  RPE65 RNA guide
ugaacucucauccuaagugc

SEQ ID NO: 40576 - RNA, 20 nt, Artificial Sequence
  RPE65 RNA guide
ugaagcuugaagucccuuuc

SEQ ID NO: 40577 - RNA, 20 nt, Artificial Sequence
  RPE65 RNA guide
ugaaggugggaacucaaggu

SEQ ID NO: 40578 - RNA, 20 nt, Artificial Sequence
  RPE65 RNA guide
ugaagucccuuucaguucca

SEQ ID NO: 40579 - RNA, 20 nt, Artificial Sequence
  RPE65 RNA guide
ugaaucuggaguuaccugug

SEQ ID NO: 40580 - RNA, 20 nt, Artificial Sequence
  RPE65 RNA guide
ugaauguccuccaguugaga

SEQ ID NO: 40581 - RNA, 20 nt, Artificial Sequence
  RPE65 RNA guide
ugaccucagaccuagggaca

SEQ ID NO: 40582 - RNA, 20 nt, Artificial Sequence
  RPE65 RNA guide
ugaccugaaaccauaaguuu

SEQ ID NO: 40583 - RNA, 20 nt, Artificial Sequence
  RPE65 RNA guide
ugagagaaggaagauacauu

SEQ ID NO: 40584 - RNA, 20 nt, Artificial Sequence
  RPE65 RNA guide
ugagaguucaagggguagug

SEQ ID NO: 40585 - RNA, 20 nt, Artificial Sequence
  RPE65 RNA guide
ugaggacucaaacuuauggu

SEQ ID NO: 40586 - RNA, 20 nt, Artificial Sequence
  RPE65 RNA guide
ugagggggcauuauguucug

SEQ ID NO: 40587 - RNA, 20 nt, Artificial Sequence
  RPE65 RNA guide
ugaggucaucacuaccccuu

SEQ ID NO: 40588 - RNA, 20 nt, Artificial Sequence
  RPE65 RNA guide
ugaguccucagacuucuuua

SEQ ID NO: 40589 - RNA, 20 nt, Artificial Sequence
  RPE65 RNA guide
ugaguucccaccuucaugca

SEQ ID NO: 40590 - RNA, 20 nt, Artificial Sequence
  RPE65 RNA guide
ugaguuuggaacugaaaggg

SEQ ID NO: 40591 - RNA, 20 nt, Artificial Sequence
  RPE65 RNA guide
ugaugaccucagaccuaggg

SEQ ID NO: 40592 - RNA, 20 nt, Artificial Sequence
  RPE65 RNA guide
ugauguauaccauacagugc

SEQ ID NO: 40593 - RNA, 20 nt, Artificial Sequence
  RPE65 RNA guide
ugcacaugguacuguaugag

SEQ ID NO: 40594 - RNA, 20 nt, Artificial Sequence
  RPE65 RNA guide
ugcacuuaggaugagaguuc

SEQ ID NO: 40595 - RNA, 20 nt, Artificial Sequence
  RPE65 RNA guide
ugcacuucucuuucuuccca

SEQ ID NO: 40596 - RNA, 20 nt, Artificial Sequence
  RPE65 RNA guide
ugcagaacauaaugcccccu

SEQ ID NO: 40597 - RNA, 20 nt, Artificial Sequence
  RPE65 RNA guide
ugcagauugaccugaaacca

SEQ ID NO: 40598 - RNA, 20 nt, Artificial Sequence
  RPE65 RNA guide
ugcaugaaggugggaacuca

SEQ ID NO: 40599 - RNA, 20 nt, Artificial Sequence
  RPE65 RNA guide
ugcccccucaugugucugaa

SEQ ID NO: 40600 - RNA, 20 nt, Artificial Sequence
  RPE65 RNA guide
ugcucugguuaguuacuuuu

SEQ ID NO: 40601 - RNA, 20 nt, Artificial Sequence
  RPE65 RNA guide
uggaacugaaagggacuuca

SEQ ID NO: 40602 - RNA, 20 nt, Artificial Sequence
  RPE65 RNA guide
uggaggacauucacuuuacu

SEQ ID NO: 40603 - RNA, 20 nt, Artificial Sequence
  RPE65 RNA guide
uggaguuaccugugacaucu

SEQ ID NO: 40604 - RNA, 20 nt, Artificial Sequence
  RPE65 RNA guide
uggauucuacccucuuucac

SEQ ID NO: 40605 - RNA, 20 nt, Artificial Sequence
  RPE65 RNA guide
ugggaacucaaggugaaaga

SEQ ID NO: 40606 - RNA, 20 nt, Artificial Sequence
  RPE65 RNA guide
ugggaagaaagagaagugca

SEQ ID NO: 40607 - RNA, 20 nt, Artificial Sequence
  RPE65 RNA guide
ugguacuguaugaguuugga

SEQ ID NO: 40608 - RNA, 20 nt, Artificial Sequence
  RPE65 RNA guide
ugguauuuacauaguaccau

SEQ ID NO: 40609 - RNA, 20 nt, Artificial Sequence
  RPE65 RNA guide
ugguuucaggucaaucugca

SEQ ID NO: 40610 - RNA, 20 nt, Artificial Sequence
  RPE65 RNA guide
uguauaccauacagugcucu

SEQ ID NO: 40611 - RNA, 20 nt, Artificial Sequence
  RPE65 RNA guide
uguaucuuccuucucucaac

SEQ ID NO: 40612 - RNA, 20 nt, Artificial Sequence
  RPE65 RNA guide
uguaugaguuuggaacugaa

SEQ ID NO: 40613 - RNA, 20 nt, Artificial Sequence
  RPE65 RNA guide
ugucaauuucguaugguacu

SEQ ID NO: 40614 - RNA, 20 nt, Artificial Sequence
  RPE65 RNA guide
ugucacagguaacuccagau

SEQ ID NO: 40615 - RNA, 20 nt, Artificial Sequence
  RPE65 RNA guide
ugucccuaggucugagguca

SEQ ID NO: 40616 - RNA, 20 nt, Artificial Sequence
  RPE65 RNA guide
uguccuccaguugagagaag

SEQ ID NO: 40617 - RNA, 20 nt, Artificial Sequence
  RPE65 RNA guide
ugucugaaucuggaguuacc

SEQ ID NO: 40618 - RNA, 20 nt, Artificial Sequence
  RPE65 RNA guide
ugucuugcacaugguacugu

SEQ ID NO: 40619 - RNA, 20 nt, Artificial Sequence
  RPE65 RNA guide
ugugcaagacauauaguugg

SEQ ID NO: 40620 - RNA, 20 nt, Artificial Sequence
  RPE65 RNA guide
ugugucugaaucuggaguua

SEQ ID NO: 40621 - RNA, 20 nt, Artificial Sequence
  RPE65 RNA guide
uguucugcaugaagguggga

SEQ ID NO: 40622 - RNA, 20 nt, Artificial Sequence
  RPE65 RNA guide
uuaccugugacaucucuuua

SEQ ID NO: 40623 - RNA, 20 nt, Artificial Sequence
  RPE65 RNA guide
uuagcauaugcagauugacc

SEQ ID NO: 40624 - RNA, 20 nt, Artificial Sequence
  RPE65 RNA guide
uuaggaugagaguucaaggg

SEQ ID NO: 40625 - RNA, 20 nt, Artificial Sequence
  RPE65 RNA guide
uuauaccuuugucccuaggu

SEQ ID NO: 40626 - RNA, 20 nt, Artificial Sequence
  RPE65 RNA guide
uuaugguuucaggucaaucu

SEQ ID NO: 40627 - RNA, 20 nt, Artificial Sequence
  RPE65 RNA guide
uuauguucugcaugaaggug

SEQ ID NO: 40628 - RNA, 20 nt, Artificial Sequence
  RPE65 RNA guide
uucaagggguagugaugacc

SEQ ID NO: 40629 - RNA, 20 nt, Artificial Sequence
  RPE65 RNA guide
uucaccuugaguucccaccu

SEQ ID NO: 40630 - RNA, 20 nt, Artificial Sequence
  RPE65 RNA guide
uucagacacaugagggggca

SEQ ID NO: 40631 - RNA, 20 nt, Artificial Sequence
  RPE65 RNA guide
uucaggucaaucugcauaug

SEQ ID NO: 40632 - RNA, 20 nt, Artificial Sequence
  RPE65 RNA guide
uucaguuccaaacucauaca

SEQ ID NO: 40633 - RNA, 20 nt, Artificial Sequence
  RPE65 RNA guide
uucaugcagaacauaaugcc

SEQ ID NO: 40634 - RNA, 20 nt, Artificial Sequence
  RPE65 RNA guide
uuccaaacucauacaguacc

SEQ ID NO: 40635 - RNA, 20 nt, Artificial Sequence
  RPE65 RNA guide
uucccaccuucaugcagaac

SEQ ID NO: 40636 - RNA, 20 nt, Artificial Sequence
  RPE65 RNA guide
uucccaucucucuggauucu

SEQ ID NO: 40637 - RNA, 20 nt, Artificial Sequence
  RPE65 RNA guide
uuccuucucucaacuggagg

SEQ ID NO: 40638 - RNA, 20 nt, Artificial Sequence
  RPE65 RNA guide
uucguaugguacuauguaaa

SEQ ID NO: 40639 - RNA, 20 nt, Artificial Sequence
  RPE65 RNA guide
uucuacccucuuucaccuug

SEQ ID NO: 40640 - RNA, 20 nt, Artificial Sequence
  RPE65 RNA guide
uucuauacuagaugaagcuu

SEQ ID NO: 40641 - RNA, 20 nt, Artificial Sequence
  RPE65 RNA guide
uucucucaacuggaggacau

SEQ ID NO: 40642 - RNA, 20 nt, Artificial Sequence
  RPE65 RNA guide
uucucuuucuucccaucucu

SEQ ID NO: 40643 - RNA, 20 nt, Artificial Sequence
  RPE65 RNA guide
uucugcaugaaggugggaac

SEQ ID NO: 40644 - RNA, 20 nt, Artificial Sequence
  RPE65 RNA guide
uucuucccaucucucuggau

SEQ ID NO: 40645 - RNA, 20 nt, Artificial Sequence
  RPE65 RNA guide
uucuuuuagcauaugcagau

SEQ ID NO: 40646 - RNA, 20 nt, Artificial Sequence
  RPE65 RNA guide
uugaacucucauccuaagug

SEQ ID NO: 40647 - RNA, 20 nt, Artificial Sequence
  RPE65 RNA guide
uugaagucccuuucaguucc

SEQ ID NO: 40648 - RNA, 20 nt, Artificial Sequence
  RPE65 RNA guide
uugaccugaaaccauaaguu

SEQ ID NO: 40649 - RNA, 20 nt, Artificial Sequence
  RPE65 RNA guide
uugaguccucagacuucuuu

SEQ ID NO: 40650 - RNA, 20 nt, Artificial Sequence
  RPE65 RNA guide
uugaguucccaccuucaugc

SEQ ID NO: 40651 - RNA, 20 nt, Artificial Sequence
  RPE65 RNA guide
uugauguauaccauacagug

SEQ ID NO: 40652 - RNA, 20 nt, Artificial Sequence
  RPE65 RNA guide
uugcacaugguacuguauga

SEQ ID NO: 40653 - RNA, 20 nt, Artificial Sequence
  RPE65 RNA guide
uuggaacugaaagggacuuc

SEQ ID NO: 40654 - RNA, 20 nt, Artificial Sequence
  RPE65 RNA guide
uugguauuuacauaguacca

SEQ ID NO: 40655 - RNA, 20 nt, Artificial Sequence
  RPE65 RNA guide
uugucccuaggucugagguc

SEQ ID NO: 40656 - RNA, 20 nt, Artificial Sequence
  RPE65 RNA guide
uuuagcauaugcagauugac

SEQ ID NO: 40657 - RNA, 20 nt, Artificial Sequence
  RPE65 RNA guide
uuucaccuugaguucccacc

SEQ ID NO: 40658 - RNA, 20 nt, Artificial Sequence
  RPE65 RNA guide
uuucaggucaaucugcauau

SEQ ID NO: 40659 - RNA, 20 nt, Artificial Sequence
  RPE65 RNA guide
uuucaguuccaaacucauac

SEQ ID NO: 40660 - RNA, 20 nt, Artificial Sequence
  RPE65 RNA guide
uuucuucccaucucucugga

SEQ ID NO: 40661 - RNA, 20 nt, Artificial Sequence
  RPE65 RNA guide
uuugaguccucagacuucuu

SEQ ID NO: 40662 - RNA, 20 nt, Artificial Sequence
  RPE65 RNA guide
uuugauguauaccauacagu

SEQ ID NO: 40663 - RNA, 20 nt, Artificial Sequence
  RPE65 RNA guide
uuuggaacugaaagggacuu

SEQ ID NO: 40664 - RNA, 20 nt, Artificial Sequence
  RPE65 RNA guide
uuugucccuaggucugaggu

SEQ ID NO: 40665 - RNA, 20 nt, Artificial Sequence
  RPE65 RNA guide
uuuuagcauaugcagauuga

SEQ ID NO: 40666 - RNA, 21 nt, Artificial Sequence
  RPE65 RNA guide
aaaagaaaaguaacuaaccag

SEQ ID NO: 40667 - RNA, 21 nt, Artificial Sequence
  RPE65 RNA guide
aaaaguaacuaaccagagcac

SEQ ID NO: 40668 - RNA, 21 nt, Artificial Sequence
  RPE65 RNA guide
aaaccauaaguuugaguccuc

SEQ ID NO: 40669 - RNA, 21 nt, Artificial Sequence
  RPE65 RNA guide
aaacucauacaguaccaugug

SEQ ID NO: 40670 - RNA, 21 nt, Artificial Sequence
  RPE65 RNA guide
aaacuuaugguuucaggucaa

SEQ ID NO: 40671 - RNA, 21 nt, Artificial Sequence
  RPE65 RNA guide
aaagaaaaguaacuaaccaga

SEQ ID NO: 40672 - RNA, 21 nt, Artificial Sequence
  RPE65 RNA guide
aaagaagucugaggacucaaa

SEQ ID NO: 40673 - RNA, 21 nt, Artificial Sequence
  RPE65 RNA guide
aaagagaagugcacuuaggau

SEQ ID NO: 40674 - RNA, 21 nt, Artificial Sequence
  RPE65 RNA guide
aaagagaugucacagguaacu

SEQ ID NO: 40675 - RNA, 21 nt, Artificial Sequence
  RPE65 RNA guide
aaagaggguagaauccagaga

SEQ ID NO: 40676 - RNA, 21 nt, Artificial Sequence
  RPE65 RNA guide
aaagggacuucaagcuucauc

SEQ ID NO: 40677 - RNA, 21 nt, Artificial Sequence
  RPE65 RNA guide
aaagguauaauguaucuuccu

SEQ ID NO: 40678 - RNA, 21 nt, Artificial Sequence
  RPE65 RNA guide
aaaguaacuaaccagagcacu

SEQ ID NO: 40679 - RNA, 21 nt, Artificial Sequence
  RPE65 RNA guide
aaagugaauguccuccaguug

SEQ ID NO: 40680 - RNA, 21 nt, Artificial Sequence
  RPE65 RNA guide
aaauaaagagaugucacaggu

SEQ ID NO: 40681 - RNA, 21 nt, Artificial Sequence
  RPE65 RNA guide
aaauaccaacuauaugucuug

SEQ ID NO: 40682 - RNA, 21 nt, Artificial Sequence
  RPE65 RNA guide
aacauaaugcccccucaugug

SEQ ID NO: 40683 - RNA, 21 nt, Artificial Sequence
  RPE65 RNA guide
aaccagagcacuguaugguau

SEQ ID NO: 40684 - RNA, 21 nt, Artificial Sequence
  RPE65 RNA guide
aaccauaaguuugaguccuca

SEQ ID NO: 40685 - RNA, 21 nt, Artificial Sequence
  RPE65 RNA guide
aacuaaccagagcacuguaug

SEQ ID NO: 40686 - RNA, 21 nt, Artificial Sequence
  RPE65 RNA guide
aacuauaugucuugcacaugg

SEQ ID NO: 40687 - RNA, 21 nt, Artificial Sequence
  RPE65 RNA guide
aacucaaggugaaagagggua

SEQ ID NO: 40688 - RNA, 21 nt, Artificial Sequence
  RPE65 RNA guide
aacucauacaguaccaugugc

SEQ ID NO: 40689 - RNA, 21 nt, Artificial Sequence
  RPE65 RNA guide
aacuccagauucagacacaug

SEQ ID NO: 40690 - RNA, 21 nt, Artificial Sequence
  RPE65 RNA guide
aacucucauccuaagugcacu

SEQ ID NO: 40691 - RNA, 21 nt, Artificial Sequence
  RPE65 RNA guide
aacugaaagggacuucaagcu

SEQ ID NO: 40692 - RNA, 21 nt, Artificial Sequence
  RPE65 RNA guide
aacuggaggacauucacuuua

SEQ ID NO: 40693 - RNA, 21 nt, Artificial Sequence
  RPE65 RNA guide
aacuuaugguuucaggucaau

SEQ ID NO: 40694 - RNA, 21 nt, Artificial Sequence
  RPE65 RNA guide
aagaaaaguaacuaaccagag

SEQ ID NO: 40695 - RNA, 21 nt, Artificial Sequence
  RPE65 RNA guide
aagaaagagaagugcacuuag

SEQ ID NO: 40696 - RNA, 21 nt, Artificial Sequence
  RPE65 RNA guide
aagaagucugaggacucaaac

SEQ ID NO: 40697 - RNA, 21 nt, Artificial Sequence
  RPE65 RNA guide
aagagaagugcacuuaggaug

SEQ ID NO: 40698 - RNA, 21 nt, Artificial Sequence
  RPE65 RNA guide
aagagaugucacagguaacuc

SEQ ID NO: 40699 - RNA, 21 nt, Artificial Sequence
  RPE65 RNA guide
aagaggguagaauccagagag

SEQ ID NO: 40700 - RNA, 21 nt, Artificial Sequence
  RPE65 RNA guide
aagaguauaaagaagucugag

SEQ ID NO: 40701 - RNA, 21 nt, Artificial Sequence
  RPE65 RNA guide
aagauacauuauaccuuuguc

SEQ ID NO: 40702 - RNA, 21 nt, Artificial Sequence
  RPE65 RNA guide
aagcuugaagucccuuucagu

SEQ ID NO: 40703 - RNA, 21 nt, Artificial Sequence
  RPE65 RNA guide
aaggaagauacauuauaccuu

SEQ ID NO: 40704 - RNA, 21 nt, Artificial Sequence
  RPE65 RNA guide
aagggacuucaagcuucaucu

SEQ ID NO: 40705 - RNA, 21 nt, Artificial Sequence
  RPE65 RNA guide
aagggguagugaugaccucag

SEQ ID NO: 40706 - RNA, 21 nt, Artificial Sequence
  RPE65 RNA guide
aagguauaauguaucuuccuu

SEQ ID NO: 40707 - RNA, 21 nt, Artificial Sequence
  RPE65 RNA guide
aaggugaaagaggguagaauc

SEQ ID NO: 40708 - RNA, 21 nt, Artificial Sequence
  RPE65 RNA guide
aaggugggaacucaaggugaa

SEQ ID NO: 40709 - RNA, 21 nt, Artificial Sequence
  RPE65 RNA guide
aaguaaagugaauguccucca

SEQ ID NO: 40710 - RNA, 21 nt, Artificial Sequence
  RPE65 RNA guide
aaguaacuaaccagagcacug

SEQ ID NO: 40711 - RNA, 21 nt, Artificial Sequence
  RPE65 RNA guide
aagucccuuucaguuccaaac

SEQ ID NO: 40712 - RNA, 21 nt, Artificial Sequence
  RPE65 RNA guide
aagucugaggacucaaacuua

SEQ ID NO: 40713 - RNA, 21 nt, Artificial Sequence
  RPE65 RNA guide
aagugaauguccuccaguuga

SEQ ID NO: 40714 - RNA, 21 nt, Artificial Sequence
  RPE65 RNA guide
aagugcacuuaggaugagagu

SEQ ID NO: 40715 - RNA, 21 nt, Artificial Sequence
  RPE65 RNA guide
aagugcacuucucuuucuucc

SEQ ID NO: 40716 - RNA, 21 nt, Artificial Sequence
  RPE65 RNA guide
aaguuugaguccucagacuuc

SEQ ID NO: 40717 - RNA, 21 nt, Artificial Sequence
  RPE65 RNA guide
aauaaagagaugucacaggua

SEQ ID NO: 40718 - RNA, 21 nt, Artificial Sequence
  RPE65 RNA guide
aauaagaguauaaagaagucu

SEQ ID NO: 40719 - RNA, 21 nt, Artificial Sequence
  RPE65 RNA guide
aauaccaacuauaugucuugc

SEQ ID NO: 40720 - RNA, 21 nt, Artificial Sequence
  RPE65 RNA guide
aauccagagagaugggaagaa

SEQ ID NO: 40721 - RNA, 21 nt, Artificial Sequence
  RPE65 RNA guide
aaucuggaguuaccugugaca

SEQ ID NO: 40722 - RNA, 21 nt, Artificial Sequence
  RPE65 RNA guide
aaugcccccucaugugucuga

SEQ ID NO: 40723 - RNA, 21 nt, Artificial Sequence
  RPE65 RNA guide
aauguaucuuccuucucucaa

SEQ ID NO: 40724 - RNA, 21 nt, Artificial Sequence
  RPE65 RNA guide
aaugucaauuucguaugguac

SEQ ID NO: 40725 - RNA, 21 nt, Artificial Sequence
  RPE65 RNA guide
aauguccuccaguugagagaa

SEQ ID NO: 40726 - RNA, 21 nt, Artificial Sequence
  RPE65 RNA guide
acaaagguauaauguaucuuc

SEQ ID NO: 40727 - RNA, 21 nt, Artificial Sequence
  RPE65 RNA guide
acacaugagggggcauuaugu

SEQ ID NO: 40728 - RNA, 21 nt, Artificial Sequence
  RPE65 RNA guide
acagguaacuccagauucaga

SEQ ID NO: 40729 - RNA, 21 nt, Artificial Sequence
  RPE65 RNA guide
acaguaccaugugcaagacau

SEQ ID NO: 40730 - RNA, 21 nt, Artificial Sequence
  RPE65 RNA guide
acagugcucugguuaguuacu

SEQ ID NO: 40731 - RNA, 21 nt, Artificial Sequence
  RPE65 RNA guide
acauaaugcccccucaugugu

SEQ ID NO: 40732 - RNA, 21 nt, Artificial Sequence
  RPE65 RNA guide
acauaguaccauacgaaauug

SEQ ID NO: 40733 - RNA, 21 nt, Artificial Sequence
  RPE65 RNA guide
acaucaaauaaagagauguca

SEQ ID NO: 40734 - RNA, 21 nt, Artificial Sequence
  RPE65 RNA guide
acaugagggggcauuauguuc

SEQ ID NO: 40735 - RNA, 21 nt, Artificial Sequence
  RPE65 RNA guide
acaugguacuguaugaguuug

SEQ ID NO: 40736 - RNA, 21 nt, Artificial Sequence
  RPE65 RNA guide
acauuauaccuuugucccuag

SEQ ID NO: 40737 - RNA, 21 nt, Artificial Sequence
  RPE65 RNA guide
accaacuauaugucuugcaca

SEQ ID NO: 40738 - RNA, 21 nt, Artificial Sequence
  RPE65 RNA guide
accagagcacuguaugguaua

SEQ ID NO: 40739 - RNA, 21 nt, Artificial Sequence
  RPE65 RNA guide
accauaaguuugaguccucag

SEQ ID NO: 40740 - RNA, 21 nt, Artificial Sequence
  RPE65 RNA guide
accauacagugcucugguuag

SEQ ID NO: 40741 - RNA, 21 nt, Artificial Sequence
  RPE65 RNA guide
accauacgaaauugacauuuu

SEQ ID NO: 40742 - RNA, 21 nt, Artificial Sequence
  RPE65 RNA guide
accaugugcaagacauauagu

SEQ ID NO: 40743 - RNA, 21 nt, Artificial Sequence
  RPE65 RNA guide
accccuugaacucucauccua

SEQ ID NO: 40744 - RNA, 21 nt, Artificial Sequence
  RPE65 RNA guide
acccucuuucaccuugaguuc

SEQ ID NO: 40745 - RNA, 21 nt, Artificial Sequence
  RPE65 RNA guide
accuagggacaaagguauaau

SEQ ID NO: 40746 - RNA, 21 nt, Artificial Sequence
  RPE65 RNA guide
accucagaccuagggacaaag

SEQ ID NO: 40747 - RNA, 21 nt, Artificial Sequence
  RPE65 RNA guide
accugaaaccauaaguuugag

SEQ ID NO: 40748 - RNA, 21 nt, Artificial Sequence
  RPE65 RNA guide
accugugacaucucuuuauuu

SEQ ID NO: 40749 - RNA, 21 nt, Artificial Sequence
  RPE65 RNA guide
accuucaugcagaacauaaug

SEQ ID NO: 40750 - RNA, 21 nt, Artificial Sequence
  RPE65 RNA guide
accuugaguucccaccuucau

SEQ ID NO: 40751 - RNA, 21 nt, Artificial Sequence
  RPE65 RNA guide
accuuugucccuaggucugag

SEQ ID NO: 40752 - RNA, 21 nt, Artificial Sequence
  RPE65 RNA guide
acggaaguaaagugaaugucc

SEQ ID NO: 40753 - RNA, 21 nt, Artificial Sequence
  RPE65 RNA guide
acuaaccagagcacuguaugg

SEQ ID NO: 40754 - RNA, 21 nt, Artificial Sequence
  RPE65 RNA guide
acuaccccuugaacucucauc

SEQ ID NO: 40755 - RNA, 21 nt, Artificial Sequence
  RPE65 RNA guide
acuagaugaagcuugaagucc

SEQ ID NO: 40756 - RNA, 21 nt, Artificial Sequence
  RPE65 RNA guide
acuauaugucuugcacauggu

SEQ ID NO: 40757 - RNA, 21 nt, Artificial Sequence
  RPE65 RNA guide
acucaaacuuaugguuucagg

SEQ ID NO: 40758 - RNA, 21 nt, Artificial Sequence
  RPE65 RNA guide
acucaaggugaaagaggguag

SEQ ID NO: 40759 - RNA, 21 nt, Artificial Sequence
  RPE65 RNA guide
acucauacaguaccaugugca

SEQ ID NO: 40760 - RNA, 21 nt, Artificial Sequence
  RPE65 RNA guide
acuccagauucagacacauga

SEQ ID NO: 40761 - RNA, 21 nt, Artificial Sequence
  RPE65 RNA guide
acucucauccuaagugcacuu

SEQ ID NO: 40762 - RNA, 21 nt, Artificial Sequence
  RPE65 RNA guide
acugaaagggacuucaagcuu

SEQ ID NO: 40763 - RNA, 21 nt, Artificial Sequence
  RPE65 RNA guide
acuggaggacauucacuuuac

SEQ ID NO: 40764 - RNA, 21 nt, Artificial Sequence
  RPE65 RNA guide
acuguaugaguuuggaacuga

SEQ ID NO: 40765 - RNA, 21 nt, Artificial Sequence
  RPE65 RNA guide
acuuaggaugagaguucaagg

SEQ ID NO: 40766 - RNA, 21 nt, Artificial Sequence
  RPE65 RNA guide
acuuaugguuucaggucaauc

SEQ ID NO: 40767 - RNA, 21 nt, Artificial Sequence
  RPE65 RNA guide
acuucaagcuucaucuaguau

SEQ ID NO: 40768 - RNA, 21 nt, Artificial Sequence
  RPE65 RNA guide
acuucucuuucuucccaucuc

SEQ ID NO: 40769 - RNA, 21 nt, Artificial Sequence
  RPE65 RNA guide
acuuucuauacuagaugaagc

SEQ ID NO: 40770 - RNA, 21 nt, Artificial Sequence
  RPE65 RNA guide
agaaaaguaacuaaccagagc

SEQ ID NO: 40771 - RNA, 21 nt, Artificial Sequence
  RPE65 RNA guide
agaaagagaagugcacuuagg

SEQ ID NO: 40772 - RNA, 21 nt, Artificial Sequence
  RPE65 RNA guide
agaacauaaugcccccucaug

SEQ ID NO: 40773 - RNA, 21 nt, Artificial Sequence
  RPE65 RNA guide
agaaggaagauacauuauacc

SEQ ID NO: 40774 - RNA, 21 nt, Artificial Sequence
  RPE65 RNA guide
agaagucugaggacucaaacu

SEQ ID NO: 40775 - RNA, 21 nt, Artificial Sequence
  RPE65 RNA guide
agaagugcacuuaggaugaga

SEQ ID NO: 40776 - RNA, 21 nt, Artificial Sequence
  RPE65 RNA guide
agaauccagagagaugggaag

SEQ ID NO: 40777 - RNA, 21 nt, Artificial Sequence
  RPE65 RNA guide
agacacaugagggggcauuau

SEQ ID NO: 40778 - RNA, 21 nt, Artificial Sequence
  RPE65 RNA guide
agaccuagggacaaagguaua

SEQ ID NO: 40779 - RNA, 21 nt, Artificial Sequence
  RPE65 RNA guide
agagaaggaagauacauuaua

SEQ ID NO: 40780 - RNA, 21 nt, Artificial Sequence
  RPE65 RNA guide
agagaagugcacuuaggauga

SEQ ID NO: 40781 - RNA, 21 nt, Artificial Sequence
  RPE65 RNA guide
agagagaugggaagaaagaga

SEQ ID NO: 40782 - RNA, 21 nt, Artificial Sequence
  RPE65 RNA guide
agagaugggaagaaagagaag

SEQ ID NO: 40783 - RNA, 21 nt, Artificial Sequence
  RPE65 RNA guide
agagaugucacagguaacucc

SEQ ID NO: 40784 - RNA, 21 nt, Artificial Sequence
  RPE65 RNA guide
agagcacuguaugguauacau

SEQ ID NO: 40785 - RNA, 21 nt, Artificial Sequence
  RPE65 RNA guide
agaggguagaauccagagaga

SEQ ID NO: 40786 - RNA, 21 nt, Artificial Sequence
  RPE65 RNA guide
agaguauaaagaagucugagg

SEQ ID NO: 40787 - RNA, 21 nt, Artificial Sequence
  RPE65 RNA guide
agaguucaagggguagugaug

SEQ ID NO: 40788 - RNA, 21 nt, Artificial Sequence
  RPE65 RNA guide
agauacauuauaccuuugucc

SEQ ID NO: 40789 - RNA, 21 nt, Artificial Sequence
  RPE65 RNA guide
agaugaagcuugaagucccuu

SEQ ID NO: 40790 - RNA, 21 nt, Artificial Sequence
  RPE65 RNA guide
agaugggaagaaagagaagug

SEQ ID NO: 40791 - RNA, 21 nt, Artificial Sequence
  RPE65 RNA guide
agaugucacagguaacuccag

SEQ ID NO: 40792 - RNA, 21 nt, Artificial Sequence
  RPE65 RNA guide
agauucagacacaugaggggg

SEQ ID NO: 40793 - RNA, 21 nt, Artificial Sequence
  RPE65 RNA guide
agauugaccugaaaccauaag

SEQ ID NO: 40794 - RNA, 21 nt, Artificial Sequence
  RPE65 RNA guide
agcacuguaugguauacauca

SEQ ID NO: 40795 - RNA, 21 nt, Artificial Sequence
  RPE65 RNA guide
agcauaugcagauugaccuga

SEQ ID NO: 40796 - RNA, 21 nt, Artificial Sequence
  RPE65 RNA guide
agcuugaagucccuuucaguu

SEQ ID NO: 40797 - RNA, 21 nt, Artificial Sequence
  RPE65 RNA guide
aggaagauacauuauaccuuu

SEQ ID NO: 40798 - RNA, 21 nt, Artificial Sequence
  RPE65 RNA guide
aggacucaaacuuaugguuuc

SEQ ID NO: 40799 - RNA, 21 nt, Artificial Sequence
  RPE65 RNA guide
aggaugagaguucaaggggua

SEQ ID NO: 40800 - RNA, 21 nt, Artificial Sequence
  RPE65 RNA guide
agggacaaagguauaauguau

SEQ ID NO: 40801 - RNA, 21 nt, Artificial Sequence
  RPE65 RNA guide
agggacuucaagcuucaucua

SEQ ID NO: 40802 - RNA, 21 nt, Artificial Sequence
  RPE65 RNA guide
agggggcauuauguucugcau

SEQ ID NO: 40803 - RNA, 21 nt, Artificial Sequence
  RPE65 RNA guide
agggguagugaugaccucaga

SEQ ID NO: 40804 - RNA, 21 nt, Artificial Sequence
  RPE65 RNA guide
aggguagaauccagagagaug

SEQ ID NO: 40805 - RNA, 21 nt, Artificial Sequence
  RPE65 RNA guide
agguaacuccagauucagaca

SEQ ID NO: 40806 - RNA, 21 nt, Artificial Sequence
  RPE65 RNA guide
agguauaauguaucuuccuuc

SEQ ID NO: 40807 - RNA, 21 nt, Artificial Sequence
  RPE65 RNA guide
aggucaaucugcauaugcuaa

SEQ ID NO: 40808 - RNA, 21 nt, Artificial Sequence
  RPE65 RNA guide
aggucaucacuaccccuugaa

SEQ ID NO: 40809 - RNA, 21 nt, Artificial Sequence
  RPE65 RNA guide
aggucugaggucaucacuacc

SEQ ID NO: 40810 - RNA, 21 nt, Artificial Sequence
  RPE65 RNA guide
aggugaaagaggguagaaucc

SEQ ID NO: 40811 - RNA, 21 nt, Artificial Sequence
  RPE65 RNA guide
aggugggaacucaaggugaaa

SEQ ID NO: 40812 - RNA, 21 nt, Artificial Sequence
  RPE65 RNA guide
aguaaagugaauguccuccag

SEQ ID NO: 40813 - RNA, 21 nt, Artificial Sequence
  RPE65 RNA guide
aguaacuaaccagagcacugu

SEQ ID NO: 40814 - RNA, 21 nt, Artificial Sequence
  RPE65 RNA guide
aguaccaugugcaagacauau

SEQ ID NO: 40815 - RNA, 21 nt, Artificial Sequence
  RPE65 RNA guide
aguauaaagaagucugaggac

SEQ ID NO: 40816 - RNA, 21 nt, Artificial Sequence
  RPE65 RNA guide
agucccuuucaguuccaaacu

SEQ ID NO: 40817 - RNA, 21 nt, Artificial Sequence
  RPE65 RNA guide
aguccucagacuucuuuauac

SEQ ID NO: 40818 - RNA, 21 nt, Artificial Sequence
  RPE65 RNA guide
agucugaggacucaaacuuau

SEQ ID NO: 40819 - RNA, 21 nt, Artificial Sequence
  RPE65 RNA guide
agugaauguccuccaguugag

SEQ ID NO: 40820 - RNA, 21 nt, Artificial Sequence
  RPE65 RNA guide
agugaugaccucagaccuagg

SEQ ID NO: 40821 - RNA, 21 nt, Artificial Sequence
  RPE65 RNA guide
agugcacuuaggaugagaguu

SEQ ID NO: 40822 - RNA, 21 nt, Artificial Sequence
  RPE65 RNA guide
agugcacuucucuuucuuccc

SEQ ID NO: 40823 - RNA, 21 nt, Artificial Sequence
  RPE65 RNA guide
agugcucugguuaguuacuuu

SEQ ID NO: 40824 - RNA, 21 nt, Artificial Sequence
  RPE65 RNA guide
aguuaccugugacaucucuuu

SEQ ID NO: 40825 - RNA, 21 nt, Artificial Sequence
  RPE65 RNA guide
aguucaagggguagugaugac

SEQ ID NO: 40826 - RNA, 21 nt, Artificial Sequence
  RPE65 RNA guide
aguuccaaacucauacaguac

SEQ ID NO: 40827 - RNA, 21 nt, Artificial Sequence
  RPE65 RNA guide
aguucccaccuucaugcagaa

SEQ ID NO: 40828 - RNA, 21 nt, Artificial Sequence
  RPE65 RNA guide
aguugagagaaggaagauaca

SEQ ID NO: 40829 - RNA, 21 nt, Artificial Sequence
  RPE65 RNA guide
aguugguauuuacauaguacc

SEQ ID NO: 40830 - RNA, 21 nt, Artificial Sequence
  RPE65 RNA guide
aguuugaguccucagacuucu

SEQ ID NO: 40831 - RNA, 21 nt, Artificial Sequence
  RPE65 RNA guide
aguuuggaacugaaagggacu

SEQ ID NO: 40832 - RNA, 21 nt, Artificial Sequence
  RPE65 RNA guide
auaaagaagucugaggacuca

SEQ ID NO: 40833 - RNA, 21 nt, Artificial Sequence
  RPE65 RNA guide
auaaagagaugucacagguaa

SEQ ID NO: 40834 - RNA, 21 nt, Artificial Sequence
  RPE65 RNA guide
auaagaguauaaagaagucug

SEQ ID NO: 40835 - RNA, 21 nt, Artificial Sequence
  RPE65 RNA guide
auaaguuugaguccucagacu

SEQ ID NO: 40836 - RNA, 21 nt, Artificial Sequence
  RPE65 RNA guide
auaaugcccccucaugugucu

SEQ ID NO: 40837 - RNA, 21 nt, Artificial Sequence
  RPE65 RNA guide
auaauguaucuuccuucucuc

SEQ ID NO: 40838 - RNA, 21 nt, Artificial Sequence
  RPE65 RNA guide
auacaguaccaugugcaagac

SEQ ID NO: 40839 - RNA, 21 nt, Artificial Sequence
  RPE65 RNA guide
auacagugcucugguuaguua

SEQ ID NO: 40840 - RNA, 21 nt, Artificial Sequence
  RPE65 RNA guide
auacauuauaccuuugucccu

SEQ ID NO: 40841 - RNA, 21 nt, Artificial Sequence
  RPE65 RNA guide
auaccaacuauaugucuugca

SEQ ID NO: 40842 - RNA, 21 nt, Artificial Sequence
  RPE65 RNA guide
auaccauacagugcucugguu

SEQ ID NO: 40843 - RNA, 21 nt, Artificial Sequence
  RPE65 RNA guide
auaccuuugucccuaggucug

SEQ ID NO: 40844 - RNA, 21 nt, Artificial Sequence
  RPE65 RNA guide
auacuagaugaagcuugaagu

SEQ ID NO: 40845 - RNA, 21 nt, Artificial Sequence
  RPE65 RNA guide
auaugcagauugaccugaaac

SEQ ID NO: 40846 - RNA, 21 nt, Artificial Sequence
  RPE65 RNA guide
auaugucuugcacaugguacu

SEQ ID NO: 40847 - RNA, 21 nt, Artificial Sequence
  RPE65 RNA guide
aucaaauaaagagaugucaca

SEQ ID NO: 40848 - RNA, 21 nt, Artificial Sequence
  RPE65 RNA guide
aucacuaccccuugaacucuc

SEQ ID NO: 40849 - RNA, 21 nt, Artificial Sequence
  RPE65 RNA guide
auccagagagaugggaagaaa

SEQ ID NO: 40850 - RNA, 21 nt, Artificial Sequence
  RPE65 RNA guide
auccuaagugcacuucucuuu

SEQ ID NO: 40851 - RNA, 21 nt, Artificial Sequence
  RPE65 RNA guide
aucucucuggauucuacccuc

SEQ ID NO: 40852 - RNA, 21 nt, Artificial Sequence
  RPE65 RNA guide
aucuggaguuaccugugacau

SEQ ID NO: 40853 - RNA, 21 nt, Artificial Sequence
  RPE65 RNA guide
aucuuccuucucucaacugga

SEQ ID NO: 40854 - RNA, 21 nt, Artificial Sequence
  RPE65 RNA guide
augaagcuugaagucccuuuc

SEQ ID NO: 40855 - RNA, 21 nt, Artificial Sequence
  RPE65 RNA guide
augaaggugggaacucaaggu

SEQ ID NO: 40856 - RNA, 21 nt, Artificial Sequence
  RPE65 RNA guide
augaccucagaccuagggaca

SEQ ID NO: 40857 - RNA, 21 nt, Artificial Sequence
  RPE65 RNA guide
augagaguucaagggguagug

SEQ ID NO: 40858 - RNA, 21 nt, Artificial Sequence
  RPE65 RNA guide
augagggggcauuauguucug

SEQ ID NO: 40859 - RNA, 21 nt, Artificial Sequence
  RPE65 RNA guide
augaguuuggaacugaaaggg

SEQ ID NO: 40860 - RNA, 21 nt, Artificial Sequence
  RPE65 RNA guide
augcagaacauaaugcccccu

SEQ ID NO: 40861 - RNA, 21 nt, Artificial Sequence
  RPE65 RNA guide
augcagauugaccugaaacca

SEQ ID NO: 40862 - RNA, 21 nt, Artificial Sequence
  RPE65 RNA guide
augcccccucaugugucugaa

SEQ ID NO: 40863 - RNA, 21 nt, Artificial Sequence
  RPE65 RNA guide
augggaagaaagagaagugca

SEQ ID NO: 40864 - RNA, 21 nt, Artificial Sequence
  RPE65 RNA guide
augguacuguaugaguuugga

SEQ ID NO: 40865 - RNA, 21 nt, Artificial Sequence
  RPE65 RNA guide
augguuucaggucaaucugca

SEQ ID NO: 40866 - RNA, 21 nt, Artificial Sequence
  RPE65 RNA guide
auguauaccauacagugcucu

SEQ ID NO: 40867 - RNA, 21 nt, Artificial Sequence
  RPE65 RNA guide
auguaucuuccuucucucaac

SEQ ID NO: 40868 - RNA, 21 nt, Artificial Sequence
  RPE65 RNA guide
augucaauuucguaugguacu

SEQ ID NO: 40869 - RNA, 21 nt, Artificial Sequence
  RPE65 RNA guide
augucacagguaacuccagau

SEQ ID NO: 40870 - RNA, 21 nt, Artificial Sequence
  RPE65 RNA guide
auguccuccaguugagagaag

SEQ ID NO: 40871 - RNA, 21 nt, Artificial Sequence
  RPE65 RNA guide
augucuugcacaugguacugu

SEQ ID NO: 40872 - RNA, 21 nt, Artificial Sequence
  RPE65 RNA guide
augugcaagacauauaguugg

SEQ ID NO: 40873 - RNA, 21 nt, Artificial Sequence
  RPE65 RNA guide
augugucugaaucuggaguua

SEQ ID NO: 40874 - RNA, 21 nt, Artificial Sequence
  RPE65 RNA guide
auguucugcaugaagguggga

SEQ ID NO: 40875 - RNA, 21 nt, Artificial Sequence
  RPE65 RNA guide
auuauaccuuugucccuaggu

SEQ ID NO: 40876 - RNA, 21 nt, Artificial Sequence
  RPE65 RNA guide
auuauguucugcaugaaggug

SEQ ID NO: 40877 - RNA, 21 nt, Artificial Sequence
  RPE65 RNA guide
auucagacacaugagggggca

SEQ ID NO: 40878 - RNA, 21 nt, Artificial Sequence
  RPE65 RNA guide
auucuacccucuuucaccuug

SEQ ID NO: 40879 - RNA, 21 nt, Artificial Sequence
  RPE65 RNA guide
auugaccugaaaccauaaguu

SEQ ID NO: 40880 - RNA, 21 nt, Artificial Sequence
  RPE65 RNA guide
auuugauguauaccauacagu

SEQ ID NO: 40881 - RNA, 21 nt, Artificial Sequence
  RPE65 RNA guide
caaaaaugucaauuucguaug

SEQ ID NO: 40882 - RNA, 21 nt, Artificial Sequence
  RPE65 RNA guide
caaacucauacaguaccaugu

SEQ ID NO: 40883 - RNA, 21 nt, Artificial Sequence
  RPE65 RNA guide
caaacuuaugguuucagguca

SEQ ID NO: 40884 - RNA, 21 nt, Artificial Sequence
  RPE65 RNA guide
caaagguauaauguaucuucc

SEQ ID NO: 40885 - RNA, 21 nt, Artificial Sequence
  RPE65 RNA guide
caaauaaagagaugucacagg

SEQ ID NO: 40886 - RNA, 21 nt, Artificial Sequence
  RPE65 RNA guide
caacuauaugucuugcacaug

SEQ ID NO: 40887 - RNA, 21 nt, Artificial Sequence
  RPE65 RNA guide
caacuggaggacauucacuuu

SEQ ID NO: 40888 - RNA, 21 nt, Artificial Sequence
  RPE65 RNA guide
caagggguagugaugaccuca

SEQ ID NO: 40889 - RNA, 21 nt, Artificial Sequence
  RPE65 RNA guide
caaggugaaagaggguagaau

SEQ ID NO: 40890 - RNA, 21 nt, Artificial Sequence
  RPE65 RNA guide
caaucugcauaugcuaaaaga

SEQ ID NO: 40891 - RNA, 21 nt, Artificial Sequence
  RPE65 RNA guide
cacagguaacuccagauucag

SEQ ID NO: 40892 - RNA, 21 nt, Artificial Sequence
  RPE65 RNA guide
cacaugagggggcauuauguu

SEQ ID NO: 40893 - RNA, 21 nt, Artificial Sequence
  RPE65 RNA guide
cacaugguacuguaugaguuu

SEQ ID NO: 40894 - RNA, 21 nt, Artificial Sequence
  RPE65 RNA guide
caccuucaugcagaacauaau

SEQ ID NO: 40895 - RNA, 21 nt, Artificial Sequence
  RPE65 RNA guide
caccuugaguucccaccuuca

SEQ ID NO: 40896 - RNA, 21 nt, Artificial Sequence
  RPE65 RNA guide
cacuaccccuugaacucucau

SEQ ID NO: 40897 - RNA, 21 nt, Artificial Sequence
  RPE65 RNA guide
cacuuaggaugagaguucaag

SEQ ID NO: 40898 - RNA, 21 nt, Artificial Sequence
  RPE65 RNA guide
cacuucucuuucuucccaucu

SEQ ID NO: 40899 - RNA, 21 nt, Artificial Sequence
  RPE65 RNA guide
cagaacauaaugcccccucau

SEQ ID NO: 40900 - RNA, 21 nt, Artificial Sequence
  RPE65 RNA guide
cagacacaugagggggcauua

SEQ ID NO: 40901 - RNA, 21 nt, Artificial Sequence
  RPE65 RNA guide
cagaccuagggacaaagguau

SEQ ID NO: 40902 - RNA, 21 nt, Artificial Sequence
  RPE65 RNA guide
cagagagaugggaagaaagag

SEQ ID NO: 40903 - RNA, 21 nt, Artificial Sequence
  RPE65 RNA guide
cagagcacuguaugguauaca

SEQ ID NO: 40904 - RNA, 21 nt, Artificial Sequence
  RPE65 RNA guide
cagauucagacacaugagggg

SEQ ID NO: 40905 - RNA, 21 nt, Artificial Sequence
  RPE65 RNA guide
cagauugaccugaaaccauaa

SEQ ID NO: 40906 - RNA, 21 nt, Artificial Sequence
  RPE65 RNA guide
cagguaacuccagauucagac

SEQ ID NO: 40907 - RNA, 21 nt, Artificial Sequence
  RPE65 RNA guide
caggucaaucugcauaugcua

SEQ ID NO: 40908 - RNA, 21 nt, Artificial Sequence
  RPE65 RNA guide
caguaccaugugcaagacaua

SEQ ID NO: 40909 - RNA, 21 nt, Artificial Sequence
  RPE65 RNA guide
cagugcucugguuaguuacuu

SEQ ID NO: 40910 - RNA, 21 nt, Artificial Sequence
  RPE65 RNA guide
caguuccaaacucauacagua

SEQ ID NO: 40911 - RNA, 21 nt, Artificial Sequence
  RPE65 RNA guide
caguugagagaaggaagauac

SEQ ID NO: 40912 - RNA, 21 nt, Artificial Sequence
  RPE65 RNA guide
cauaaguuugaguccucagac

SEQ ID NO: 40913 - RNA, 21 nt, Artificial Sequence
  RPE65 RNA guide
cauaaugcccccucauguguc

SEQ ID NO: 40914 - RNA, 21 nt, Artificial Sequence
  RPE65 RNA guide
cauacaguaccaugugcaaga

SEQ ID NO: 40915 - RNA, 21 nt, Artificial Sequence
  RPE65 RNA guide
cauacagugcucugguuaguu

SEQ ID NO: 40916 - RNA, 21 nt, Artificial Sequence
  RPE65 RNA guide
cauaguaccauacgaaauuga

SEQ ID NO: 40917 - RNA, 21 nt, Artificial Sequence
  RPE65 RNA guide
cauaugcagauugaccugaaa

SEQ ID NO: 40918 - RNA, 21 nt, Artificial Sequence
  RPE65 RNA guide
caucaaauaaagagaugucac

SEQ ID NO: 40919 - RNA, 21 nt, Artificial Sequence
  RPE65 RNA guide
caucacuaccccuugaacucu

SEQ ID NO: 40920 - RNA, 21 nt, Artificial Sequence
  RPE65 RNA guide
cauccuaagugcacuucucuu

SEQ ID NO: 40921 - RNA, 21 nt, Artificial Sequence
  RPE65 RNA guide
caucucucuggauucuacccu

SEQ ID NO: 40922 - RNA, 21 nt, Artificial Sequence
  RPE65 RNA guide
caugaaggugggaacucaagg

SEQ ID NO: 40923 - RNA, 21 nt, Artificial Sequence
  RPE65 RNA guide
caugagggggcauuauguucu

SEQ ID NO: 40924 - RNA, 21 nt, Artificial Sequence
  RPE65 RNA guide
caugcagaacauaaugccccc

SEQ ID NO: 40925 - RNA, 21 nt, Artificial Sequence
  RPE65 RNA guide
caugguacuguaugaguuugg

SEQ ID NO: 40926 - RNA, 21 nt, Artificial Sequence
  RPE65 RNA guide
caugugcaagacauauaguug

SEQ ID NO: 40927 - RNA, 21 nt, Artificial Sequence
  RPE65 RNA guide
caugugucugaaucuggaguu

SEQ ID NO: 40928 - RNA, 21 nt, Artificial Sequence
  RPE65 RNA guide
cauuauaccuuugucccuagg

SEQ ID NO: 40929 - RNA, 21 nt, Artificial Sequence
  RPE65 RNA guide
cauuauguucugcaugaaggu

SEQ ID NO: 40930 - RNA, 21 nt, Artificial Sequence
  RPE65 RNA guide
ccaaaaaugucaauuucguau

SEQ ID NO: 40931 - RNA, 21 nt, Artificial Sequence
  RPE65 RNA guide
ccaaacucauacaguaccaug

SEQ ID NO: 40932 - RNA, 21 nt, Artificial Sequence
  RPE65 RNA guide
ccaacuauaugucuugcacau

SEQ ID NO: 40933 - RNA, 21 nt, Artificial Sequence
  RPE65 RNA guide
ccaccuucaugcagaacauaa

SEQ ID NO: 40934 - RNA, 21 nt, Artificial Sequence
  RPE65 RNA guide
ccagagagaugggaagaaaga

SEQ ID NO: 40935 - RNA, 21 nt, Artificial Sequence
  RPE65 RNA guide
ccagagcacuguaugguauac

SEQ ID NO: 40936 - RNA, 21 nt, Artificial Sequence
  RPE65 RNA guide
ccagauucagacacaugaggg

SEQ ID NO: 40937 - RNA, 21 nt, Artificial Sequence
  RPE65 RNA guide
ccaguugagagaaggaagaua

SEQ ID NO: 40938 - RNA, 21 nt, Artificial Sequence
  RPE65 RNA guide
ccauaaguuugaguccucaga

SEQ ID NO: 40939 - RNA, 21 nt, Artificial Sequence
  RPE65 RNA guide
ccauacagugcucugguuagu

SEQ ID NO: 40940 - RNA, 21 nt, Artificial Sequence
  RPE65 RNA guide
ccauacgaaauugacauuuuu

SEQ ID NO: 40941 - RNA, 21 nt, Artificial Sequence
  RPE65 RNA guide
ccaucucucuggauucuaccc

SEQ ID NO: 40942 - RNA, 21 nt, Artificial Sequence
  RPE65 RNA guide
ccaugugcaagacauauaguu

SEQ ID NO: 40943 - RNA, 21 nt, Artificial Sequence
  RPE65 RNA guide
cccaccuucaugcagaacaua

SEQ ID NO: 40944 - RNA, 21 nt, Artificial Sequence
  RPE65 RNA guide
cccaucucucuggauucuacc

SEQ ID NO: 40945 - RNA, 21 nt, Artificial Sequence
  RPE65 RNA guide
cccccucaugugucugaaucu

SEQ ID NO: 40946 - RNA, 21 nt, Artificial Sequence
  RPE65 RNA guide
ccccucaugugucugaaucug

SEQ ID NO: 40947 - RNA, 21 nt, Artificial Sequence
  RPE65 RNA guide
ccccuugaacucucauccuaa

SEQ ID NO: 40948 - RNA, 21 nt, Artificial Sequence
  RPE65 RNA guide
cccuaggucugaggucaucac

SEQ ID NO: 40949 - RNA, 21 nt, Artificial Sequence
  RPE65 RNA guide
cccucaugugucugaaucugg

SEQ ID NO: 40950 - RNA, 21 nt, Artificial Sequence
  RPE65 RNA guide
cccucuuucaccuugaguucc

SEQ ID NO: 40951 - RNA, 21 nt, Artificial Sequence
  RPE65 RNA guide
cccuugaacucucauccuaag

SEQ ID NO: 40952 - RNA, 21 nt, Artificial Sequence
  RPE65 RNA guide
cccuuucaguuccaaacucau

SEQ ID NO: 40953 - RNA, 21 nt, Artificial Sequence
  RPE65 RNA guide
ccuaagugcacuucucuuucu

SEQ ID NO: 40954 - RNA, 21 nt, Artificial Sequence
  RPE65 RNA guide
ccuagggacaaagguauaaug

SEQ ID NO: 40955 - RNA, 21 nt, Artificial Sequence
  RPE65 RNA guide
ccuaggucugaggucaucacu

SEQ ID NO: 40956 - RNA, 21 nt, Artificial Sequence
  RPE65 RNA guide
ccucagaccuagggacaaagg

SEQ ID NO: 40957 - RNA, 21 nt, Artificial Sequence
  RPE65 RNA guide
ccucagacuucuuuauacucu

SEQ ID NO: 40958 - RNA, 21 nt, Artificial Sequence
  RPE65 RNA guide
ccucaugugucugaaucugga

SEQ ID NO: 40959 - RNA, 21 nt, Artificial Sequence
  RPE65 RNA guide
ccuccaguugagagaaggaag

SEQ ID NO: 40960 - RNA, 21 nt, Artificial Sequence
  RPE65 RNA guide
ccucuuucaccuugaguuccc

SEQ ID NO: 40961 - RNA, 21 nt, Artificial Sequence
  RPE65 RNA guide
ccugaaaccauaaguuugagu

SEQ ID NO: 40962 - RNA, 21 nt, Artificial Sequence
  RPE65 RNA guide
ccugugacaucucuuuauuug

SEQ ID NO: 40963 - RNA, 21 nt, Artificial Sequence
  RPE65 RNA guide
ccuucaugcagaacauaaugc

SEQ ID NO: 40964 - RNA, 21 nt, Artificial Sequence
  RPE65 RNA guide
ccuucucucaacuggaggaca

SEQ ID NO: 40965 - RNA, 21 nt, Artificial Sequence
  RPE65 RNA guide
ccuugaacucucauccuaagu

SEQ ID NO: 40966 - RNA, 21 nt, Artificial Sequence
  RPE65 RNA guide
ccuugaguucccaccuucaug

SEQ ID NO: 40967 - RNA, 21 nt, Artificial Sequence
  RPE65 RNA guide
ccuuucaguuccaaacucaua

SEQ ID NO: 40968 - RNA, 21 nt, Artificial Sequence
  RPE65 RNA guide
ccuuugucccuaggucugagg

SEQ ID NO: 40969 - RNA, 21 nt, Artificial Sequence
  RPE65 RNA guide
cgaaauugacauuuuuggaaa

SEQ ID NO: 40970 - RNA, 21 nt, Artificial Sequence
  RPE65 RNA guide
cggaaguaaagugaauguccu

SEQ ID NO: 40971 - RNA, 21 nt, Artificial Sequence
  RPE65 RNA guide
cguaugguacuauguaaauac

SEQ ID NO: 40972 - RNA, 21 nt, Artificial Sequence
  RPE65 RNA guide
cuaaaagaaaaguaacuaacc

SEQ ID NO: 40973 - RNA, 21 nt, Artificial Sequence
  RPE65 RNA guide
cuaaccagagcacuguauggu

SEQ ID NO: 40974 - RNA, 21 nt, Artificial Sequence
  RPE65 RNA guide
cuaagugcacuucucuuucuu

SEQ ID NO: 40975 - RNA, 21 nt, Artificial Sequence
  RPE65 RNA guide
cuaccccuugaacucucaucc

SEQ ID NO: 40976 - RNA, 21 nt, Artificial Sequence
  RPE65 RNA guide
cuacccucuuucaccuugagu

SEQ ID NO: 40977 - RNA, 21 nt, Artificial Sequence
  RPE65 RNA guide
cuacggaaguaaagugaaugu

SEQ ID NO: 40978 - RNA, 21 nt, Artificial Sequence
  RPE65 RNA guide
cuagaugaagcuugaaguccc

SEQ ID NO: 40979 - RNA, 21 nt, Artificial Sequence
  RPE65 RNA guide
cuagggacaaagguauaaugu

SEQ ID NO: 40980 - RNA, 21 nt, Artificial Sequence
  RPE65 RNA guide
cuaggucugaggucaucacua

SEQ ID NO: 40981 - RNA, 21 nt, Artificial Sequence
  RPE65 RNA guide
cuauacuagaugaagcuugaa

SEQ ID NO: 40982 - RNA, 21 nt, Artificial Sequence
  RPE65 RNA guide
cuauaugucuugcacauggua

SEQ ID NO: 40983 - RNA, 21 nt, Artificial Sequence
  RPE65 RNA guide
cucaaacuuaugguuucaggu

SEQ ID NO: 40984 - RNA, 21 nt, Artificial Sequence
  RPE65 RNA guide
cucaacuggaggacauucacu

SEQ ID NO: 40985 - RNA, 21 nt, Artificial Sequence
  RPE65 RNA guide
cucaaggugaaagaggguaga

SEQ ID NO: 40986 - RNA, 21 nt, Artificial Sequence
  RPE65 RNA guide
cucagaccuagggacaaaggu

SEQ ID NO: 40987 - RNA, 21 nt, Artificial Sequence
  RPE65 RNA guide
cucauacaguaccaugugcaa

SEQ ID NO: 40988 - RNA, 21 nt, Artificial Sequence
  RPE65 RNA guide
cucauccuaagugcacuucuc

SEQ ID NO: 40989 - RNA, 21 nt, Artificial Sequence
  RPE65 RNA guide
cucaugugucugaaucuggag

SEQ ID NO: 40990 - RNA, 21 nt, Artificial Sequence
  RPE65 RNA guide
cuccagauucagacacaugag

SEQ ID NO: 40991 - RNA, 21 nt, Artificial Sequence
  RPE65 RNA guide
cuccaguugagagaaggaaga

SEQ ID NO: 40992 - RNA, 21 nt, Artificial Sequence
  RPE65 RNA guide
cucucaacuggaggacauuca

SEQ ID NO: 40993 - RNA, 21 nt, Artificial Sequence
  RPE65 RNA guide
cucucauccuaagugcacuuc

SEQ ID NO: 40994 - RNA, 21 nt, Artificial Sequence
  RPE65 RNA guide
cucucuggauucuacccucuu

SEQ ID NO: 40995 - RNA, 21 nt, Artificial Sequence
  RPE65 RNA guide
cucuggauucuacccucuuuc

SEQ ID NO: 40996 - RNA, 21 nt, Artificial Sequence
  RPE65 RNA guide
cucugguuaguuacuuuucuu

SEQ ID NO: 40997 - RNA, 21 nt, Artificial Sequence
  RPE65 RNA guide
cucuuucaccuugaguuccca

SEQ ID NO: 40998 - RNA, 21 nt, Artificial Sequence
  RPE65 RNA guide
cucuuucuucccaucucucug

SEQ ID NO: 40999 - RNA, 21 nt, Artificial Sequence
  RPE65 RNA guide
cugaaaccauaaguuugaguc

SEQ ID NO: 41000 - RNA, 21 nt, Artificial Sequence
  RPE65 RNA guide
cugaaagggacuucaagcuuc

SEQ ID NO: 41001 - RNA, 21 nt, Artificial Sequence
  RPE65 RNA guide
cugaaucuggaguuaccugug

SEQ ID NO: 41002 - RNA, 21 nt, Artificial Sequence
  RPE65 RNA guide
cugaggacucaaacuuauggu

SEQ ID NO: 41003 - RNA, 21 nt, Artificial Sequence
  RPE65 RNA guide
cugaggucaucacuaccccuu

SEQ ID NO: 41004 - RNA, 21 nt, Artificial Sequence
  RPE65 RNA guide
cugauuuccaaaaaugucaau

SEQ ID NO: 41005 - RNA, 21 nt, Artificial Sequence
  RPE65 RNA guide
cugcauaugcuaaaagaaaag

SEQ ID NO: 41006 - RNA, 21 nt, Artificial Sequence
  RPE65 RNA guide
cugcaugaaggugggaacuca

SEQ ID NO: 41007 - RNA, 21 nt, Artificial Sequence
  RPE65 RNA guide
cuggaggacauucacuuuacu

SEQ ID NO: 41008 - RNA, 21 nt, Artificial Sequence
  RPE65 RNA guide
cuggaguuaccugugacaucu

SEQ ID NO: 41009 - RNA, 21 nt, Artificial Sequence
  RPE65 RNA guide
cuggauucuacccucuuucac

SEQ ID NO: 41010 - RNA, 21 nt, Artificial Sequence
  RPE65 RNA guide
cugguuaguuacuuuucuuuu

SEQ ID NO: 41011 - RNA, 21 nt, Artificial Sequence
  RPE65 RNA guide
cuguaugaguuuggaacugaa

SEQ ID NO: 41012 - RNA, 21 nt, Artificial Sequence
  RPE65 RNA guide
cugugacaucucuuuauuuga

SEQ ID NO: 41013 - RNA, 21 nt, Artificial Sequence
  RPE65 RNA guide
cuuaggaugagaguucaaggg

SEQ ID NO: 41014 - RNA, 21 nt, Artificial Sequence
  RPE65 RNA guide
cuuaugguuucaggucaaucu

SEQ ID NO: 41015 - RNA, 21 nt, Artificial Sequence
  RPE65 RNA guide
cuucaagcuucaucuaguaua

SEQ ID NO: 41016 - RNA, 21 nt, Artificial Sequence
  RPE65 RNA guide
cuucaugcagaacauaaugcc

SEQ ID NO: 41017 - RNA, 21 nt, Artificial Sequence
  RPE65 RNA guide
cuucccaucucucuggauucu

SEQ ID NO: 41018 - RNA, 21 nt, Artificial Sequence
  RPE65 RNA guide
cuuccuucucucaacuggagg

SEQ ID NO: 41019 - RNA, 21 nt, Artificial Sequence
  RPE65 RNA guide
cuucucucaacuggaggacau

SEQ ID NO: 41020 - RNA, 21 nt, Artificial Sequence
  RPE65 RNA guide
cuucucuuucuucccaucucu

SEQ ID NO: 41021 - RNA, 21 nt, Artificial Sequence
  RPE65 RNA guide
cuugaacucucauccuaagug

SEQ ID NO: 41022 - RNA, 21 nt, Artificial Sequence
  RPE65 RNA guide
cuugaagucccuuucaguucc

SEQ ID NO: 41023 - RNA, 21 nt, Artificial Sequence
  RPE65 RNA guide
cuugaguucccaccuucaugc

SEQ ID NO: 41024 - RNA, 21 nt, Artificial Sequence
  RPE65 RNA guide
cuugcacaugguacuguauga

SEQ ID NO: 41025 - RNA, 21 nt, Artificial Sequence
  RPE65 RNA guide
cuuucaccuugaguucccacc

SEQ ID NO: 41026 - RNA, 21 nt, Artificial Sequence
  RPE65 RNA guide
cuuucaguuccaaacucauac

SEQ ID NO: 41027 - RNA, 21 nt, Artificial Sequence
  RPE65 RNA guide
cuuucuauacuagaugaagcu

SEQ ID NO: 41028 - RNA, 21 nt, Artificial Sequence
  RPE65 RNA guide
cuuucuucccaucucucugga

SEQ ID NO: 41029 - RNA, 21 nt, Artificial Sequence
  RPE65 RNA guide
cuuugucccuaggucugaggu

SEQ ID NO: 41030 - RNA, 21 nt, Artificial Sequence
  RPE65 RNA guide
cuuuuagcauaugcagauuga

SEQ ID NO: 41031 - RNA, 21 nt, Artificial Sequence
  RPE65 RNA guide
cuuuucuuuuagcauaugcag

SEQ ID NO: 41032 - RNA, 21 nt, Artificial Sequence
  RPE65 RNA guide
gaaaaguaacuaaccagagca

SEQ ID NO: 41033 - RNA, 21 nt, Artificial Sequence
  RPE65 RNA guide
gaaaccauaaguuugaguccu

SEQ ID NO: 41034 - RNA, 21 nt, Artificial Sequence
  RPE65 RNA guide
gaaagagaagugcacuuagga

SEQ ID NO: 41035 - RNA, 21 nt, Artificial Sequence
  RPE65 RNA guide
gaaagaggguagaauccagag

SEQ ID NO: 41036 - RNA, 21 nt, Artificial Sequence
  RPE65 RNA guide
gaaagggacuucaagcuucau

SEQ ID NO: 41037 - RNA, 21 nt, Artificial Sequence
  RPE65 RNA guide
gaaauugacauuuuuggaaau

SEQ ID NO: 41038 - RNA, 21 nt, Artificial Sequence
  RPE65 RNA guide
gaacauaaugcccccucaugu

SEQ ID NO: 41039 - RNA, 21 nt, Artificial Sequence
  RPE65 RNA guide
gaacucaaggugaaagagggu

SEQ ID NO: 41040 - RNA, 21 nt, Artificial Sequence
  RPE65 RNA guide
gaacucucauccuaagugcac

SEQ ID NO: 41041 - RNA, 21 nt, Artificial Sequence
  RPE65 RNA guide
gaacugaaagggacuucaagc

SEQ ID NO: 41042 - RNA, 21 nt, Artificial Sequence
  RPE65 RNA guide
gaagaaagagaagugcacuua

SEQ ID NO: 41043 - RNA, 21 nt, Artificial Sequence
  RPE65 RNA guide
gaagauacauuauaccuuugu

SEQ ID NO: 41044 - RNA, 21 nt, Artificial Sequence
  RPE65 RNA guide
gaagcuugaagucccuuucag

SEQ ID NO: 41045 - RNA, 21 nt, Artificial Sequence
  RPE65 RNA guide
gaaggaagauacauuauaccu

SEQ ID NO: 41046 - RNA, 21 nt, Artificial Sequence
  RPE65 RNA guide
gaaggugggaacucaagguga

SEQ ID NO: 41047 - RNA, 21 nt, Artificial Sequence
  RPE65 RNA guide
gaaguaaagugaauguccucc

SEQ ID NO: 41048 - RNA, 21 nt, Artificial Sequence
  RPE65 RNA guide
gaagucccuuucaguuccaaa

SEQ ID NO: 41049 - RNA, 21 nt, Artificial Sequence
  RPE65 RNA guide
gaagucugaggacucaaacuu

SEQ ID NO: 41050 - RNA, 21 nt, Artificial Sequence
  RPE65 RNA guide
gaagugcacuuaggaugagag

SEQ ID NO: 41051 - RNA, 21 nt, Artificial Sequence
  RPE65 RNA guide
gaauccagagagaugggaaga

SEQ ID NO: 41052 - RNA, 21 nt, Artificial Sequence
  RPE65 RNA guide
gaaucuggaguuaccugugac

SEQ ID NO: 41053 - RNA, 21 nt, Artificial Sequence
  RPE65 RNA guide
gaauguccuccaguugagaga

SEQ ID NO: 41054 - RNA, 21 nt, Artificial Sequence
  RPE65 RNA guide
gacaaagguauaauguaucuu

SEQ ID NO: 41055 - RNA, 21 nt, Artificial Sequence
  RPE65 RNA guide
gacacaugagggggcauuaug

SEQ ID NO: 41056 - RNA, 21 nt, Artificial Sequence
  RPE65 RNA guide
gacaucucuuuauuugaugua

SEQ ID NO: 41057 - RNA, 21 nt, Artificial Sequence
  RPE65 RNA guide
gaccuagggacaaagguauaa

SEQ ID NO: 41058 - RNA, 21 nt, Artificial Sequence
  RPE65 RNA guide
gaccucagaccuagggacaaa

SEQ ID NO: 41059 - RNA, 21 nt, Artificial Sequence
  RPE65 RNA guide
gaccugaaaccauaaguuuga

SEQ ID NO: 41060 - RNA, 21 nt, Artificial Sequence
  RPE65 RNA guide
gacucaaacuuaugguuucag

SEQ ID NO: 41061 - RNA, 21 nt, Artificial Sequence
  RPE65 RNA guide
gacuucaagcuucaucuagua

SEQ ID NO: 41062 - RNA, 21 nt, Artificial Sequence
  RPE65 RNA guide
gagaaggaagauacauuauac

SEQ ID NO: 41063 - RNA, 21 nt, Artificial Sequence
  RPE65 RNA guide
gagaagugcacuuaggaugag

SEQ ID NO: 41064 - RNA, 21 nt, Artificial Sequence
  RPE65 RNA guide
gagagaaggaagauacauuau

SEQ ID NO: 41065 - RNA, 21 nt, Artificial Sequence
  RPE65 RNA guide
gagagaugggaagaaagagaa

SEQ ID NO: 41066 - RNA, 21 nt, Artificial Sequence
  RPE65 RNA guide
gagaguucaagggguagugau

SEQ ID NO: 41067 - RNA, 21 nt, Artificial Sequence
  RPE65 RNA guide
gagaugggaagaaagagaagu

SEQ ID NO: 41068 - RNA, 21 nt, Artificial Sequence
  RPE65 RNA guide
gagaugucacagguaacucca

SEQ ID NO: 41069 - RNA, 21 nt, Artificial Sequence
  RPE65 RNA guide
gagcacuguaugguauacauc

SEQ ID NO: 41070 - RNA, 21 nt, Artificial Sequence
  RPE65 RNA guide
gaggacauucacuuuacuucc

SEQ ID NO: 41071 - RNA, 21 nt, Artificial Sequence
  RPE65 RNA guide
gaggacucaaacuuaugguuu

SEQ ID NO: 41072 - RNA, 21 nt, Artificial Sequence
  RPE65 RNA guide
gagggggcauuauguucugca

SEQ ID NO: 41073 - RNA, 21 nt, Artificial Sequence
  RPE65 RNA guide
gaggguagaauccagagagau

SEQ ID NO: 41074 - RNA, 21 nt, Artificial Sequence
  RPE65 RNA guide
gaggucaucacuaccccuuga

SEQ ID NO: 41075 - RNA, 21 nt, Artificial Sequence
  RPE65 RNA guide
gaguauaaagaagucugagga

SEQ ID NO: 41076 - RNA, 21 nt, Artificial Sequence
  RPE65 RNA guide
gaguccucagacuucuuuaua

SEQ ID NO: 41077 - RNA, 21 nt, Artificial Sequence
  RPE65 RNA guide
gaguuaccugugacaucucuu

SEQ ID NO: 41078 - RNA, 21 nt, Artificial Sequence
  RPE65 RNA guide
gaguucaagggguagugauga

SEQ ID NO: 41079 - RNA, 21 nt, Artificial Sequence
  RPE65 RNA guide
gaguucccaccuucaugcaga

SEQ ID NO: 41080 - RNA, 21 nt, Artificial Sequence
  RPE65 RNA guide
gaguuuggaacugaaagggac

SEQ ID NO: 41081 - RNA, 21 nt, Artificial Sequence
  RPE65 RNA guide
gauacauuauaccuuuguccc

SEQ ID NO: 41082 - RNA, 21 nt, Artificial Sequence
  RPE65 RNA guide
gaugaagcuugaagucccuuu

SEQ ID NO: 41083 - RNA, 21 nt, Artificial Sequence
  RPE65 RNA guide
gaugaccucagaccuagggac

SEQ ID NO: 41084 - RNA, 21 nt, Artificial Sequence
  RPE65 RNA guide
gaugagaguucaagggguagu

SEQ ID NO: 41085 - RNA, 21 nt, Artificial Sequence
  RPE65 RNA guide
gaugggaagaaagagaagugc

SEQ ID NO: 41086 - RNA, 21 nt, Artificial Sequence
  RPE65 RNA guide
gauguauaccauacagugcuc

SEQ ID NO: 41087 - RNA, 21 nt, Artificial Sequence
  RPE65 RNA guide
gaugucacagguaacuccaga

SEQ ID NO: 41088 - RNA, 21 nt, Artificial Sequence
  RPE65 RNA guide
gauucagacacaugagggggc

SEQ ID NO: 41089 - RNA, 21 nt, Artificial Sequence
  RPE65 RNA guide
gauucuacccucuuucaccuu

SEQ ID NO: 41090 - RNA, 21 nt, Artificial Sequence
  RPE65 RNA guide
gauugaccugaaaccauaagu

SEQ ID NO: 41091 - RNA, 21 nt, Artificial Sequence
  RPE65 RNA guide
gcaagacauauaguugguauu

SEQ ID NO: 41092 - RNA, 21 nt, Artificial Sequence
  RPE65 RNA guide
gcacaugguacuguaugaguu

SEQ ID NO: 41093 - RNA, 21 nt, Artificial Sequence
  RPE65 RNA guide
gcacuguaugguauacaucaa

SEQ ID NO: 41094 - RNA, 21 nt, Artificial Sequence
  RPE65 RNA guide
gcacuuaggaugagaguucaa

SEQ ID NO: 41095 - RNA, 21 nt, Artificial Sequence
  RPE65 RNA guide
gcacuucucuuucuucccauc

SEQ ID NO: 41096 - RNA, 21 nt, Artificial Sequence
  RPE65 RNA guide
gcagaacauaaugcccccuca

SEQ ID NO: 41097 - RNA, 21 nt, Artificial Sequence
  RPE65 RNA guide
gcagauugaccugaaaccaua

SEQ ID NO: 41098 - RNA, 21 nt, Artificial Sequence
  RPE65 RNA guide
gcauaugcagauugaccugaa

SEQ ID NO: 41099 - RNA, 21 nt, Artificial Sequence
  RPE65 RNA guide
gcaugaaggugggaacucaag

SEQ ID NO: 41100 - RNA, 21 nt, Artificial Sequence
  RPE65 RNA guide
gcauuauguucugcaugaagg

SEQ ID NO: 41101 - RNA, 21 nt, Artificial Sequence
  RPE65 RNA guide
gcccccucaugugucugaauc

SEQ ID NO: 41102 - RNA, 21 nt, Artificial Sequence
  RPE65 RNA guide
gcuaaaagaaaaguaacuaac

SEQ ID NO: 41103 - RNA, 21 nt, Artificial Sequence
  RPE65 RNA guide
gcucugguuaguuacuuuucu

SEQ ID NO: 41104 - RNA, 21 nt, Artificial Sequence
  RPE65 RNA guide
gcugauuuccaaaaaugucaa

SEQ ID NO: 41105 - RNA, 21 nt, Artificial Sequence
  RPE65 RNA guide
gcuugaagucccuuucaguuc

SEQ ID NO: 41106 - RNA, 21 nt, Artificial Sequence
  RPE65 RNA guide
ggaacucaaggugaaagaggg

SEQ ID NO: 41107 - RNA, 21 nt, Artificial Sequence
  RPE65 RNA guide
ggaacugaaagggacuucaag

SEQ ID NO: 41108 - RNA, 21 nt, Artificial Sequence
  RPE65 RNA guide
ggaagaaagagaagugcacuu

SEQ ID NO: 41109 - RNA, 21 nt, Artificial Sequence
  RPE65 RNA guide
ggaagauacauuauaccuuug

SEQ ID NO: 41110 - RNA, 21 nt, Artificial Sequence
  RPE65 RNA guide
ggaaguaaagugaauguccuc

SEQ ID NO: 41111 - RNA, 21 nt, Artificial Sequence
  RPE65 RNA guide
ggacaaagguauaauguaucu

SEQ ID NO: 41112 - RNA, 21 nt, Artificial Sequence
  RPE65 RNA guide
ggacucaaacuuaugguuuca

SEQ ID NO: 41113 - RNA, 21 nt, Artificial Sequence
  RPE65 RNA guide
ggacuucaagcuucaucuagu

SEQ ID NO: 41114 - RNA, 21 nt, Artificial Sequence
  RPE65 RNA guide
ggaggacauucacuuuacuuc

SEQ ID NO: 41115 - RNA, 21 nt, Artificial Sequence
  RPE65 RNA guide
ggaguuaccugugacaucucu

SEQ ID NO: 41116 - RNA, 21 nt, Artificial Sequence
  RPE65 RNA guide
ggaugagaguucaagggguag

SEQ ID NO: 41117 - RNA, 21 nt, Artificial Sequence
  RPE65 RNA guide
ggauucuacccucuuucaccu

SEQ ID NO: 41118 - RNA, 21 nt, Artificial Sequence
  RPE65 RNA guide
ggcauuauguucugcaugaag

SEQ ID NO: 41119 - RNA, 21 nt, Artificial Sequence
  RPE65 RNA guide
gggaacucaaggugaaagagg

SEQ ID NO: 41120 - RNA, 21 nt, Artificial Sequence
  RPE65 RNA guide
gggaagaaagagaagugcacu

SEQ ID NO: 41121 - RNA, 21 nt, Artificial Sequence
  RPE65 RNA guide
gggacaaagguauaauguauc

SEQ ID NO: 41122 - RNA, 21 nt, Artificial Sequence
  RPE65 RNA guide
gggacuucaagcuucaucuag

SEQ ID NO: 41123 - RNA, 21 nt, Artificial Sequence
  RPE65 RNA guide
gggcauuauguucugcaugaa

SEQ ID NO: 41124 - RNA, 21 nt, Artificial Sequence
  RPE65 RNA guide
ggggcauuauguucugcauga

SEQ ID NO: 41125 - RNA, 21 nt, Artificial Sequence
  RPE65 RNA guide
gggggcauuauguucugcaug

SEQ ID NO: 41126 - RNA, 21 nt, Artificial Sequence
  RPE65 RNA guide
gggguagugaugaccucagac

SEQ ID NO: 41127 - RNA, 21 nt, Artificial Sequence
  RPE65 RNA guide
ggguagaauccagagagaugg

SEQ ID NO: 41128 - RNA, 21 nt, Artificial Sequence
  RPE65 RNA guide
ggguagugaugaccucagacc

SEQ ID NO: 41129 - RNA, 21 nt, Artificial Sequence
  RPE65 RNA guide
gguaacuccagauucagacac

SEQ ID NO: 41130 - RNA, 21 nt, Artificial Sequence
  RPE65 RNA guide
gguacuguaugaguuuggaac

SEQ ID NO: 41131 - RNA, 21 nt, Artificial Sequence
  RPE65 RNA guide
gguagaauccagagagauggg

SEQ ID NO: 41132 - RNA, 21 nt, Artificial Sequence
  RPE65 RNA guide
gguagugaugaccucagaccu

SEQ ID NO: 41133 - RNA, 21 nt, Artificial Sequence
  RPE65 RNA guide
gguauaauguaucuuccuucu

SEQ ID NO: 41134 - RNA, 21 nt, Artificial Sequence
  RPE65 RNA guide
gguauacaucaaauaaagaga

SEQ ID NO: 41135 - RNA, 21 nt, Artificial Sequence
  RPE65 RNA guide
gguauuuacauaguaccauac

SEQ ID NO: 41136 - RNA, 21 nt, Artificial Sequence
  RPE65 RNA guide
ggucaaucugcauaugcuaaa

SEQ ID NO: 41137 - RNA, 21 nt, Artificial Sequence
  RPE65 RNA guide
ggucaucacuaccccuugaac

SEQ ID NO: 41138 - RNA, 21 nt, Artificial Sequence
  RPE65 RNA guide
ggucugaggucaucacuaccc

SEQ ID NO: 41139 - RNA, 21 nt, Artificial Sequence
  RPE65 RNA guide
ggugaaagaggguagaaucca

SEQ ID NO: 41140 - RNA, 21 nt, Artificial Sequence
  RPE65 RNA guide
ggugggaacucaaggugaaag

SEQ ID NO: 41141 - RNA, 21 nt, Artificial Sequence
  RPE65 RNA guide
gguuucaggucaaucugcaua

SEQ ID NO: 41142 - RNA, 21 nt, Artificial Sequence
  RPE65 RNA guide
guaaagugaauguccuccagu

SEQ ID NO: 41143 - RNA, 21 nt, Artificial Sequence
  RPE65 RNA guide
guaaauaccaacuauaugucu

SEQ ID NO: 41144 - RNA, 21 nt, Artificial Sequence
  RPE65 RNA guide
guaacuaaccagagcacugua

SEQ ID NO: 41145 - RNA, 21 nt, Artificial Sequence
  RPE65 RNA guide
guaacuccagauucagacaca

SEQ ID NO: 41146 - RNA, 21 nt, Artificial Sequence
  RPE65 RNA guide
guaccauacgaaauugacauu

SEQ ID NO: 41147 - RNA, 21 nt, Artificial Sequence
  RPE65 RNA guide
guaccaugugcaagacauaua

SEQ ID NO: 41148 - RNA, 21 nt, Artificial Sequence
  RPE65 RNA guide
guacuguaugaguuuggaacu

SEQ ID NO: 41149 - RNA, 21 nt, Artificial Sequence
  RPE65 RNA guide
guagaauccagagagauggga

SEQ ID NO: 41150 - RNA, 21 nt, Artificial Sequence
  RPE65 RNA guide
guagugaugaccucagaccua

SEQ ID NO: 41151 - RNA, 21 nt, Artificial Sequence
  RPE65 RNA guide
guauaaagaagucugaggacu

SEQ ID NO: 41152 - RNA, 21 nt, Artificial Sequence
  RPE65 RNA guide
guauaauguaucuuccuucuc

SEQ ID NO: 41153 - RNA, 21 nt, Artificial Sequence
  RPE65 RNA guide
guauaccauacagugcucugg

SEQ ID NO: 41154 - RNA, 21 nt, Artificial Sequence
  RPE65 RNA guide
guaucuuccuucucucaacug

SEQ ID NO: 41155 - RNA, 21 nt, Artificial Sequence
  RPE65 RNA guide
guaugaguuuggaacugaaag

SEQ ID NO: 41156 - RNA, 21 nt, Artificial Sequence
  RPE65 RNA guide
guaugguacuauguaaauacc

SEQ ID NO: 41157 - RNA, 21 nt, Artificial Sequence
  RPE65 RNA guide
gucaaucugcauaugcuaaaa

SEQ ID NO: 41158 - RNA, 21 nt, Artificial Sequence
  RPE65 RNA guide
gucaauuucguaugguacuau

SEQ ID NO: 41159 - RNA, 21 nt, Artificial Sequence
  RPE65 RNA guide
gucacagguaacuccagauuc

SEQ ID NO: 41160 - RNA, 21 nt, Artificial Sequence
  RPE65 RNA guide
gucaucacuaccccuugaacu

SEQ ID NO: 41161 - RNA, 21 nt, Artificial Sequence
  RPE65 RNA guide
gucccuaggucugaggucauc

SEQ ID NO: 41162 - RNA, 21 nt, Artificial Sequence
  RPE65 RNA guide
gucccuuucaguuccaaacuc

SEQ ID NO: 41163 - RNA, 21 nt, Artificial Sequence
  RPE65 RNA guide
guccucagacuucuuuauacu

SEQ ID NO: 41164 - RNA, 21 nt, Artificial Sequence
  RPE65 RNA guide
guccuccaguugagagaagga

SEQ ID NO: 41165 - RNA, 21 nt, Artificial Sequence
  RPE65 RNA guide
gucugaaucuggaguuaccug

SEQ ID NO: 41166 - RNA, 21 nt, Artificial Sequence
  RPE65 RNA guide
gucugaggacucaaacuuaug

SEQ ID NO: 41167 - RNA, 21 nt, Artificial Sequence
  RPE65 RNA guide
gucugaggucaucacuacccc

SEQ ID NO: 41168 - RNA, 21 nt, Artificial Sequence
  RPE65 RNA guide
gucuugcacaugguacuguau

SEQ ID NO: 41169 - RNA, 21 nt, Artificial Sequence
  RPE65 RNA guide
gugaaagaggguagaauccag

SEQ ID NO: 41170 - RNA, 21 nt, Artificial Sequence
  RPE65 RNA guide
gugaauguccuccaguugaga

SEQ ID NO: 41171 - RNA, 21 nt, Artificial Sequence
  RPE65 RNA guide
gugaugaccucagaccuaggg

SEQ ID NO: 41172 - RNA, 21 nt, Artificial Sequence
  RPE65 RNA guide
gugcaagacauauaguuggua

SEQ ID NO: 41173 - RNA, 21 nt, Artificial Sequence
  RPE65 RNA guide
gugcacuuaggaugagaguuc

SEQ ID NO: 41174 - RNA, 21 nt, Artificial Sequence
  RPE65 RNA guide
gugcacuucucuuucuuccca

SEQ ID NO: 41175 - RNA, 21 nt, Artificial Sequence
  RPE65 RNA guide
gugcucugguuaguuacuuuu

SEQ ID NO: 41176 - RNA, 21 nt, Artificial Sequence
  RPE65 RNA guide
gugggaacucaaggugaaaga

SEQ ID NO: 41177 - RNA, 21 nt, Artificial Sequence
  RPE65 RNA guide
gugucugaaucuggaguuacc

SEQ ID NO: 41178 - RNA, 21 nt, Artificial Sequence
  RPE65 RNA guide
guuaccugugacaucucuuua

SEQ ID NO: 41179 - RNA, 21 nt, Artificial Sequence
  RPE65 RNA guide
guuacuuuucuuuuagcauau

SEQ ID NO: 41180 - RNA, 21 nt, Artificial Sequence
  RPE65 RNA guide
guucaagggguagugaugacc

SEQ ID NO: 41181 - RNA, 21 nt, Artificial Sequence
  RPE65 RNA guide
guuccaaacucauacaguacc

SEQ ID NO: 41182 - RNA, 21 nt, Artificial Sequence
  RPE65 RNA guide
guucccaccuucaugcagaac

SEQ ID NO: 41183 - RNA, 21 nt, Artificial Sequence
  RPE65 RNA guide
guucugcaugaaggugggaac

SEQ ID NO: 41184 - RNA, 21 nt, Artificial Sequence
  RPE65 RNA guide
guugagagaaggaagauacau

SEQ ID NO: 41185 - RNA, 21 nt, Artificial Sequence
  RPE65 RNA guide
guugguauuuacauaguacca

SEQ ID NO: 41186 - RNA, 21 nt, Artificial Sequence
  RPE65 RNA guide
guuucaggucaaucugcauau

SEQ ID NO: 41187 - RNA, 21 nt, Artificial Sequence
  RPE65 RNA guide
guuugaguccucagacuucuu

SEQ ID NO: 41188 - RNA, 21 nt, Artificial Sequence
  RPE65 RNA guide
guuuggaacugaaagggacuu

SEQ ID NO: 41189 - RNA, 21 nt, Artificial Sequence
  RPE65 RNA guide
uaaaagaaaaguaacuaacca

SEQ ID NO: 41190 - RNA, 21 nt, Artificial Sequence
  RPE65 RNA guide
uaaagaagucugaggacucaa

SEQ ID NO: 41191 - RNA, 21 nt, Artificial Sequence
  RPE65 RNA guide
uaaagagaugucacagguaac

SEQ ID NO: 41192 - RNA, 21 nt, Artificial Sequence
  RPE65 RNA guide
uaaagugaauguccuccaguu

SEQ ID NO: 41193 - RNA, 21 nt, Artificial Sequence
  RPE65 RNA guide
uaaauaccaacuauaugucuu

SEQ ID NO: 41194 - RNA, 21 nt, Artificial Sequence
  RPE65 RNA guide
uaaccagagcacuguauggua

SEQ ID NO: 41195 - RNA, 21 nt, Artificial Sequence
  RPE65 RNA guide
uaacuaaccagagcacuguau

SEQ ID NO: 41196 - RNA, 21 nt, Artificial Sequence
  RPE65 RNA guide
uaacuccagauucagacacau

SEQ ID NO: 41197 - RNA, 21 nt, Artificial Sequence
  RPE65 RNA guide
uaagaguauaaagaagucuga

SEQ ID NO: 41198 - RNA, 21 nt, Artificial Sequence
  RPE65 RNA guide
uaagugcacuucucuuucuuc

SEQ ID NO: 41199 - RNA, 21 nt, Artificial Sequence
  RPE65 RNA guide
uaaguuugaguccucagacuu

SEQ ID NO: 41200 - RNA, 21 nt, Artificial Sequence
  RPE65 RNA guide
uaaugcccccucaugugucug

SEQ ID NO: 41201 - RNA, 21 nt, Artificial Sequence
  RPE65 RNA guide
uaauguaucuuccuucucuca

SEQ ID NO: 41202 - RNA, 21 nt, Artificial Sequence
  RPE65 RNA guide
uacaguaccaugugcaagaca

SEQ ID NO: 41203 - RNA, 21 nt, Artificial Sequence
  RPE65 RNA guide
uacagugcucugguuaguuac

SEQ ID NO: 41204 - RNA, 21 nt, Artificial Sequence
  RPE65 RNA guide
uacauaguaccauacgaaauu

SEQ ID NO: 41205 - RNA, 21 nt, Artificial Sequence
  RPE65 RNA guide
uacaucaaauaaagagauguc

SEQ ID NO: 41206 - RNA, 21 nt, Artificial Sequence
  RPE65 RNA guide
uacauuauaccuuugucccua

SEQ ID NO: 41207 - RNA, 21 nt, Artificial Sequence
  RPE65 RNA guide
uaccaacuauaugucuugcac

SEQ ID NO: 41208 - RNA, 21 nt, Artificial Sequence
  RPE65 RNA guide
uaccauacagugcucugguua

SEQ ID NO: 41209 - RNA, 21 nt, Artificial Sequence
  RPE65 RNA guide
uaccauacgaaauugacauuu

SEQ ID NO: 41210 - RNA, 21 nt, Artificial Sequence
  RPE65 RNA guide
uaccaugugcaagacauauag

SEQ ID NO: 41211 - RNA, 21 nt, Artificial Sequence
  RPE65 RNA guide
uaccccuugaacucucauccu

SEQ ID NO: 41212 - RNA, 21 nt, Artificial Sequence
  RPE65 RNA guide
uacccucuuucaccuugaguu

SEQ ID NO: 41213 - RNA, 21 nt, Artificial Sequence
  RPE65 RNA guide
uaccugugacaucucuuuauu

SEQ ID NO: 41214 - RNA, 21 nt, Artificial Sequence
  RPE65 RNA guide
uaccuuugucccuaggucuga

SEQ ID NO: 41215 - RNA, 21 nt, Artificial Sequence
  RPE65 RNA guide
uacggaaguaaagugaauguc

SEQ ID NO: 41216 - RNA, 21 nt, Artificial Sequence
  RPE65 RNA guide
uacuagaugaagcuugaaguc

SEQ ID NO: 41217 - RNA, 21 nt, Artificial Sequence
  RPE65 RNA guide
uacuguaugaguuuggaacug

SEQ ID NO: 41218 - RNA, 21 nt, Artificial Sequence
  RPE65 RNA guide
uagaauccagagagaugggaa

SEQ ID NO: 41219 - RNA, 21 nt, Artificial Sequence
  RPE65 RNA guide
uagaugaagcuugaagucccu

SEQ ID NO: 41220 - RNA, 21 nt, Artificial Sequence
  RPE65 RNA guide
uagcauaugcagauugaccug

SEQ ID NO: 41221 - RNA, 21 nt, Artificial Sequence
  RPE65 RNA guide
uaggaugagaguucaaggggu

SEQ ID NO: 41222 - RNA, 21 nt, Artificial Sequence
  RPE65 RNA guide
uagggacaaagguauaaugua

SEQ ID NO: 41223 - RNA, 21 nt, Artificial Sequence
  RPE65 RNA guide
uaggucugaggucaucacuac

SEQ ID NO: 41224 - RNA, 21 nt, Artificial Sequence
  RPE65 RNA guide
uagugaugaccucagaccuag

SEQ ID NO: 41225 - RNA, 21 nt, Artificial Sequence
  RPE65 RNA guide
uauaaagaagucugaggacuc

SEQ ID NO: 41226 - RNA, 21 nt, Artificial Sequence
  RPE65 RNA guide
uauaauguaucuuccuucucu

SEQ ID NO: 41227 - RNA, 21 nt, Artificial Sequence
  RPE65 RNA guide
uauaccauacagugcucuggu

SEQ ID NO: 41228 - RNA, 21 nt, Artificial Sequence
  RPE65 RNA guide
uauaccuuugucccuaggucu

SEQ ID NO: 41229 - RNA, 21 nt, Artificial Sequence
  RPE65 RNA guide
uauacuagaugaagcuugaag

SEQ ID NO: 41230 - RNA, 21 nt, Artificial Sequence
  RPE65 RNA guide
uauaugucuugcacaugguac

SEQ ID NO: 41231 - RNA, 21 nt, Artificial Sequence
  RPE65 RNA guide
uaucuuccuucucucaacugg

SEQ ID NO: 41232 - RNA, 21 nt, Artificial Sequence
  RPE65 RNA guide
uaugaguuuggaacugaaagg

SEQ ID NO: 41233 - RNA, 21 nt, Artificial Sequence
  RPE65 RNA guide
uaugcagauugaccugaaacc

SEQ ID NO: 41234 - RNA, 21 nt, Artificial Sequence
  RPE65 RNA guide
uaugguuucaggucaaucugc

SEQ ID NO: 41235 - RNA, 21 nt, Artificial Sequence
  RPE65 RNA guide
uaugucuugcacaugguacug

SEQ ID NO: 41236 - RNA, 21 nt, Artificial Sequence
  RPE65 RNA guide
uauguucugcaugaagguggg

SEQ ID NO: 41237 - RNA, 21 nt, Artificial Sequence
  RPE65 RNA guide
uauuugauguauaccauacag

SEQ ID NO: 41238 - RNA, 21 nt, Artificial Sequence
  RPE65 RNA guide
ucaaacuuaugguuucagguc

SEQ ID NO: 41239 - RNA, 21 nt, Artificial Sequence
  RPE65 RNA guide
ucaaauaaagagaugucacag

SEQ ID NO: 41240 - RNA, 21 nt, Artificial Sequence
  RPE65 RNA guide
ucaacuggaggacauucacuu

SEQ ID NO: 41241 - RNA, 21 nt, Artificial Sequence
  RPE65 RNA guide
ucaagcuucaucuaguauaga

SEQ ID NO: 41242 - RNA, 21 nt, Artificial Sequence
  RPE65 RNA guide
ucaagggguagugaugaccuc

SEQ ID NO: 41243 - RNA, 21 nt, Artificial Sequence
  RPE65 RNA guide
ucaaggugaaagaggguagaa

SEQ ID NO: 41244 - RNA, 21 nt, Artificial Sequence
  RPE65 RNA guide
ucacagguaacuccagauuca

SEQ ID NO: 41245 - RNA, 21 nt, Artificial Sequence
  RPE65 RNA guide
ucaccuugaguucccaccuuc

SEQ ID NO: 41246 - RNA, 21 nt, Artificial Sequence
  RPE65 RNA guide
ucacuaccccuugaacucuca

SEQ ID NO: 41247 - RNA, 21 nt, Artificial Sequence
  RPE65 RNA guide
ucagacacaugagggggcauu

SEQ ID NO: 41248 - RNA, 21 nt, Artificial Sequence
  RPE65 RNA guide
ucagaccuagggacaaaggua

SEQ ID NO: 41249 - RNA, 21 nt, Artificial Sequence
  RPE65 RNA guide
ucaggucaaucugcauaugcu

SEQ ID NO: 41250 - RNA, 21 nt, Artificial Sequence
  RPE65 RNA guide
ucaguuccaaacucauacagu

SEQ ID NO: 41251 - RNA, 21 nt, Artificial Sequence
  RPE65 RNA guide
ucauacaguaccaugugcaag

SEQ ID NO: 41252 - RNA, 21 nt, Artificial Sequence
  RPE65 RNA guide
ucaucacuaccccuugaacuc

SEQ ID NO: 41253 - RNA, 21 nt, Artificial Sequence
  RPE65 RNA guide
ucauccuaagugcacuucucu

SEQ ID NO: 41254 - RNA, 21 nt, Artificial Sequence
  RPE65 RNA guide
ucaugcagaacauaaugcccc

SEQ ID NO: 41255 - RNA, 21 nt, Artificial Sequence
  RPE65 RNA guide
ucaugugucugaaucuggagu

SEQ ID NO: 41256 - RNA, 21 nt, Artificial Sequence
  RPE65 RNA guide
uccaaaaaugucaauuucgua

SEQ ID NO: 41257 - RNA, 21 nt, Artificial Sequence
  RPE65 RNA guide
uccaaacucauacaguaccau

SEQ ID NO: 41258 - RNA, 21 nt, Artificial Sequence
  RPE65 RNA guide
uccagagagaugggaagaaag

SEQ ID NO: 41259 - RNA, 21 nt, Artificial Sequence
  RPE65 RNA guide
uccagauucagacacaugagg

SEQ ID NO: 41260 - RNA, 21 nt, Artificial Sequence
  RPE65 RNA guide
uccaguugagagaaggaagau

SEQ ID NO: 41261 - RNA, 21 nt, Artificial Sequence
  RPE65 RNA guide
ucccaccuucaugcagaacau

SEQ ID NO: 41262 - RNA, 21 nt, Artificial Sequence
  RPE65 RNA guide
ucccaucucucuggauucuac

SEQ ID NO: 41263 - RNA, 21 nt, Artificial Sequence
  RPE65 RNA guide
ucccuaggucugaggucauca

SEQ ID NO: 41264 - RNA, 21 nt, Artificial Sequence
  RPE65 RNA guide
ucccuuucaguuccaaacuca

SEQ ID NO: 41265 - RNA, 21 nt, Artificial Sequence
  RPE65 RNA guide
uccuaagugcacuucucuuuc

SEQ ID NO: 41266 - RNA, 21 nt, Artificial Sequence
  RPE65 RNA guide
uccucagacuucuuuauacuc

SEQ ID NO: 41267 - RNA, 21 nt, Artificial Sequence
  RPE65 RNA guide
uccuccaguugagagaaggaa

SEQ ID NO: 41268 - RNA, 21 nt, Artificial Sequence
  RPE65 RNA guide
uccuucucucaacuggaggac

SEQ ID NO: 41269 - RNA, 21 nt, Artificial Sequence
  RPE65 RNA guide
ucguaugguacuauguaaaua

SEQ ID NO: 41270 - RNA, 21 nt, Artificial Sequence
  RPE65 RNA guide
ucuacccucuuucaccuugag

SEQ ID NO: 41271 - RNA, 21 nt, Artificial Sequence
  RPE65 RNA guide
ucuauacuagaugaagcuuga

SEQ ID NO: 41272 - RNA, 21 nt, Artificial Sequence
  RPE65 RNA guide
ucucaacuggaggacauucac

SEQ ID NO: 41273 - RNA, 21 nt, Artificial Sequence
  RPE65 RNA guide
ucucauccuaagugcacuucu

SEQ ID NO: 41274 - RNA, 21 nt, Artificial Sequence
  RPE65 RNA guide
ucucucaacuggaggacauuc

SEQ ID NO: 41275 - RNA, 21 nt, Artificial Sequence
  RPE65 RNA guide
ucucucuggauucuacccucu

SEQ ID NO: 41276 - RNA, 21 nt, Artificial Sequence
  RPE65 RNA guide
ucucuggauucuacccucuuu

SEQ ID NO: 41277 - RNA, 21 nt, Artificial Sequence
  RPE65 RNA guide
ucucuuucuucccaucucucu

SEQ ID NO: 41278 - RNA, 21 nt, Artificial Sequence
  RPE65 RNA guide
ucugaaucuggaguuaccugu

SEQ ID NO: 41279 - RNA, 21 nt, Artificial Sequence
  RPE65 RNA guide
ucugaggacucaaacuuaugg

SEQ ID NO: 41280 - RNA, 21 nt, Artificial Sequence
  RPE65 RNA guide
ucugaggucaucacuaccccu

SEQ ID NO: 41281 - RNA, 21 nt, Artificial Sequence
  RPE65 RNA guide
ucugcaugaaggugggaacuc

SEQ ID NO: 41282 - RNA, 21 nt, Artificial Sequence
  RPE65 RNA guide
ucuggaguuaccugugacauc

SEQ ID NO: 41283 - RNA, 21 nt, Artificial Sequence
  RPE65 RNA guide
ucuggauucuacccucuuuca

SEQ ID NO: 41284 - RNA, 21 nt, Artificial Sequence
  RPE65 RNA guide
ucugguuaguuacuuuucuuu

SEQ ID NO: 41285 - RNA, 21 nt, Artificial Sequence
  RPE65 RNA guide
ucuucccaucucucuggauuc

SEQ ID NO: 41286 - RNA, 21 nt, Artificial Sequence
  RPE65 RNA guide
ucuuccuucucucaacuggag

SEQ ID NO: 41287 - RNA, 21 nt, Artificial Sequence
  RPE65 RNA guide
ucuugcacaugguacuguaug

SEQ ID NO: 41288 - RNA, 21 nt, Artificial Sequence
  RPE65 RNA guide
ucuuucaccuugaguucccac

SEQ ID NO: 41289 - RNA, 21 nt, Artificial Sequence
  RPE65 RNA guide
ucuuucuucccaucucucugg

SEQ ID NO: 41290 - RNA, 21 nt, Artificial Sequence
  RPE65 RNA guide
ucuuuuagcauaugcagauug

SEQ ID NO: 41291 - RNA, 21 nt, Artificial Sequence
  RPE65 RNA guide
ugaaaccauaaguuugagucc

SEQ ID NO: 41292 - RNA, 21 nt, Artificial Sequence
  RPE65 RNA guide
ugaaagaggguagaauccaga

SEQ ID NO: 41293 - RNA, 21 nt, Artificial Sequence
  RPE65 RNA guide
ugaaagggacuucaagcuuca

SEQ ID NO: 41294 - RNA, 21 nt, Artificial Sequence
  RPE65 RNA guide
ugaacucucauccuaagugca

SEQ ID NO: 41295 - RNA, 21 nt, Artificial Sequence
  RPE65 RNA guide
ugaagcuugaagucccuuuca

SEQ ID NO: 41296 - RNA, 21 nt, Artificial Sequence
  RPE65 RNA guide
ugaaggugggaacucaaggug

SEQ ID NO: 41297 - RNA, 21 nt, Artificial Sequence
  RPE65 RNA guide
ugaagucccuuucaguuccaa

SEQ ID NO: 41298 - RNA, 21 nt, Artificial Sequence
  RPE65 RNA guide
ugaaucuggaguuaccuguga

SEQ ID NO: 41299 - RNA, 21 nt, Artificial Sequence
  RPE65 RNA guide
ugaauguccuccaguugagag

SEQ ID NO: 41300 - RNA, 21 nt, Artificial Sequence
  RPE65 RNA guide
ugaccucagaccuagggacaa

SEQ ID NO: 41301 - RNA, 21 nt, Artificial Sequence
  RPE65 RNA guide
ugaccugaaaccauaaguuug

SEQ ID NO: 41302 - RNA, 21 nt, Artificial Sequence
  RPE65 RNA guide
ugagagaaggaagauacauua

SEQ ID NO: 41303 - RNA, 21 nt, Artificial Sequence
  RPE65 RNA guide
ugagaguucaagggguaguga

SEQ ID NO: 41304 - RNA, 21 nt, Artificial Sequence
  RPE65 RNA guide
ugaggacucaaacuuaugguu

SEQ ID NO: 41305 - RNA, 21 nt, Artificial Sequence
  RPE65 RNA guide
ugagggggcauuauguucugc

SEQ ID NO: 41306 - RNA, 21 nt, Artificial Sequence
  RPE65 RNA guide
ugaggucaucacuaccccuug

SEQ ID NO: 41307 - RNA, 21 nt, Artificial Sequence
  RPE65 RNA guide
ugaguccucagacuucuuuau

SEQ ID NO: 41308 - RNA, 21 nt, Artificial Sequence
  RPE65 RNA guide
ugaguucccaccuucaugcag

SEQ ID NO: 41309 - RNA, 21 nt, Artificial Sequence
  RPE65 RNA guide
ugaguuuggaacugaaaggga

SEQ ID NO: 41310 - RNA, 21 nt, Artificial Sequence
  RPE65 RNA guide
ugaugaccucagaccuaggga

SEQ ID NO: 41311 - RNA, 21 nt, Artificial Sequence
  RPE65 RNA guide
ugauguauaccauacagugcu

SEQ ID NO: 41312 - RNA, 21 nt, Artificial Sequence
  RPE65 RNA guide
ugcaagacauauaguugguau

SEQ ID NO: 41313 - RNA, 21 nt, Artificial Sequence
  RPE65 RNA guide
ugcacaugguacuguaugagu

SEQ ID NO: 41314 - RNA, 21 nt, Artificial Sequence
  RPE65 RNA guide
ugcacuuaggaugagaguuca

SEQ ID NO: 41315 - RNA, 21 nt, Artificial Sequence
  RPE65 RNA guide
ugcacuucucuuucuucccau

SEQ ID NO: 41316 - RNA, 21 nt, Artificial Sequence
  RPE65 RNA guide
ugcagaacauaaugcccccuc

SEQ ID NO: 41317 - RNA, 21 nt, Artificial Sequence
  RPE65 RNA guide
ugcagauugaccugaaaccau

SEQ ID NO: 41318 - RNA, 21 nt, Artificial Sequence
  RPE65 RNA guide
ugcaugaaggugggaacucaa

SEQ ID NO: 41319 - RNA, 21 nt, Artificial Sequence
  RPE65 RNA guide
ugcccccucaugugucugaau

SEQ ID NO: 41320 - RNA, 21 nt, Artificial Sequence
  RPE65 RNA guide
ugcuaaaagaaaaguaacuaa

SEQ ID NO: 41321 - RNA, 21 nt, Artificial Sequence
  RPE65 RNA guide
ugcucugguuaguuacuuuuc

SEQ ID NO: 41322 - RNA, 21 nt, Artificial Sequence
  RPE65 RNA guide
uggaacugaaagggacuucaa

SEQ ID NO: 41323 - RNA, 21 nt, Artificial Sequence
  RPE65 RNA guide
uggaggacauucacuuuacuu

SEQ ID NO: 41324 - RNA, 21 nt, Artificial Sequence
  RPE65 RNA guide
uggaguuaccugugacaucuc

SEQ ID NO: 41325 - RNA, 21 nt, Artificial Sequence
  RPE65 RNA guide
uggauucuacccucuuucacc

SEQ ID NO: 41326 - RNA, 21 nt, Artificial Sequence
  RPE65 RNA guide
ugggaacucaaggugaaagag

SEQ ID NO: 41327 - RNA, 21 nt, Artificial Sequence
  RPE65 RNA guide
ugggaagaaagagaagugcac

SEQ ID NO: 41328 - RNA, 21 nt, Artificial Sequence
  RPE65 RNA guide
ugguacuguaugaguuuggaa

SEQ ID NO: 41329 - RNA, 21 nt, Artificial Sequence
  RPE65 RNA guide
ugguauuuacauaguaccaua

SEQ ID NO: 41330 - RNA, 21 nt, Artificial Sequence
  RPE65 RNA guide
ugguuucaggucaaucugcau

SEQ ID NO: 41331 - RNA, 21 nt, Artificial Sequence
  RPE65 RNA guide
uguaaauaccaacuauauguc

SEQ ID NO: 41332 - RNA, 21 nt, Artificial Sequence
  RPE65 RNA guide
uguauaccauacagugcucug

SEQ ID NO: 41333 - RNA, 21 nt, Artificial Sequence
  RPE65 RNA guide
uguaucuuccuucucucaacu

SEQ ID NO: 41334 - RNA, 21 nt, Artificial Sequence
  RPE65 RNA guide
uguaugaguuuggaacugaaa

SEQ ID NO: 41335 - RNA, 21 nt, Artificial Sequence
  RPE65 RNA guide
ugucaauuucguaugguacua

SEQ ID NO: 41336 - RNA, 21 nt, Artificial Sequence
  RPE65 RNA guide
ugucacagguaacuccagauu

SEQ ID NO: 41337 - RNA, 21 nt, Artificial Sequence
  RPE65 RNA guide
ugucccuaggucugaggucau

SEQ ID NO: 41338 - RNA, 21 nt, Artificial Sequence
  RPE65 RNA guide
uguccuccaguugagagaagg

SEQ ID NO: 41339 - RNA, 21 nt, Artificial Sequence
  RPE65 RNA guide
ugucugaaucuggaguuaccu

SEQ ID NO: 41340 - RNA, 21 nt, Artificial Sequence
  RPE65 RNA guide
ugucuugcacaugguacugua

SEQ ID NO: 41341 - RNA, 21 nt, Artificial Sequence
  RPE65 RNA guide
ugugcaagacauauaguuggu

SEQ ID NO: 41342 - RNA, 21 nt, Artificial Sequence
  RPE65 RNA guide
ugugucugaaucuggaguuac

SEQ ID NO: 41343 - RNA, 21 nt, Artificial Sequence
  RPE65 RNA guide
uguucugcaugaaggugggaa

SEQ ID NO: 41344 - RNA, 21 nt, Artificial Sequence
  RPE65 RNA guide
uuacauaguaccauacgaaau

SEQ ID NO: 41345 - RNA, 21 nt, Artificial Sequence
  RPE65 RNA guide
uuaccugugacaucucuuuau

SEQ ID NO: 41346 - RNA, 21 nt, Artificial Sequence
  RPE65 RNA guide
uuagcauaugcagauugaccu

SEQ ID NO: 41347 - RNA, 21 nt, Artificial Sequence
  RPE65 RNA guide
uuaggaugagaguucaagggg

SEQ ID NO: 41348 - RNA, 21 nt, Artificial Sequence
  RPE65 RNA guide
uuauaccuuugucccuagguc

SEQ ID NO: 41349 - RNA, 21 nt, Artificial Sequence
  RPE65 RNA guide
uuaugguuucaggucaaucug

SEQ ID NO: 41350 - RNA, 21 nt, Artificial Sequence
  RPE65 RNA guide
uuauguucugcaugaaggugg

SEQ ID NO: 41351 - RNA, 21 nt, Artificial Sequence
  RPE65 RNA guide
uuauuugauguauaccauaca

SEQ ID NO: 41352 - RNA, 21 nt, Artificial Sequence
  RPE65 RNA guide
uucaagcuucaucuaguauag

SEQ ID NO: 41353 - RNA, 21 nt, Artificial Sequence
  RPE65 RNA guide
uucaagggguagugaugaccu

SEQ ID NO: 41354 - RNA, 21 nt, Artificial Sequence
  RPE65 RNA guide
uucaccuugaguucccaccuu

SEQ ID NO: 41355 - RNA, 21 nt, Artificial Sequence
  RPE65 RNA guide
uucagacacaugagggggcau

SEQ ID NO: 41356 - RNA, 21 nt, Artificial Sequence
  RPE65 RNA guide
uucaggucaaucugcauaugc

SEQ ID NO: 41357 - RNA, 21 nt, Artificial Sequence
  RPE65 RNA guide
uucaguuccaaacucauacag

SEQ ID NO: 41358 - RNA, 21 nt, Artificial Sequence
  RPE65 RNA guide
uucaugcagaacauaaugccc

SEQ ID NO: 41359 - RNA, 21 nt, Artificial Sequence
  RPE65 RNA guide
uuccaaaaaugucaauuucgu

SEQ ID NO: 41360 - RNA, 21 nt, Artificial Sequence
  RPE65 RNA guide
uuccaaacucauacaguacca

SEQ ID NO: 41361 - RNA, 21 nt, Artificial Sequence
  RPE65 RNA guide
uucccaccuucaugcagaaca

SEQ ID NO: 41362 - RNA, 21 nt, Artificial Sequence
  RPE65 RNA guide
uucccaucucucuggauucua

SEQ ID NO: 41363 - RNA, 21 nt, Artificial Sequence
  RPE65 RNA guide
uuccuucucucaacuggagga

SEQ ID NO: 41364 - RNA, 21 nt, Artificial Sequence
  RPE65 RNA guide
uucguaugguacuauguaaau

SEQ ID NO: 41365 - RNA, 21 nt, Artificial Sequence
  RPE65 RNA guide
uucuacccucuuucaccuuga

SEQ ID NO: 41366 - RNA, 21 nt, Artificial Sequence
  RPE65 RNA guide
uucuauacuagaugaagcuug

SEQ ID NO: 41367 - RNA, 21 nt, Artificial Sequence
  RPE65 RNA guide
uucucucaacuggaggacauu

SEQ ID NO: 41368 - RNA, 21 nt, Artificial Sequence
  RPE65 RNA guide
uucucuuucuucccaucucuc

SEQ ID NO: 41369 - RNA, 21 nt, Artificial Sequence
  RPE65 RNA guide
uucugcaugaaggugggaacu

SEQ ID NO: 41370 - RNA, 21 nt, Artificial Sequence
  RPE65 RNA guide
uucuucccaucucucuggauu

SEQ ID NO: 41371 - RNA, 21 nt, Artificial Sequence
  RPE65 RNA guide
uucuuuuagcauaugcagauu

SEQ ID NO: 41372 - RNA, 21 nt, Artificial Sequence
  RPE65 RNA guide
uugaacucucauccuaagugc

SEQ ID NO: 41373 - RNA, 21 nt, Artificial Sequence
  RPE65 RNA guide
uugaagucccuuucaguucca

SEQ ID NO: 41374 - RNA, 21 nt, Artificial Sequence
  RPE65 RNA guide
uugaccugaaaccauaaguuu

SEQ ID NO: 41375 - RNA, 21 nt, Artificial Sequence
  RPE65 RNA guide
uugagagaaggaagauacauu

SEQ ID NO: 41376 - RNA, 21 nt, Artificial Sequence
  RPE65 RNA guide
uugaguccucagacuucuuua

SEQ ID NO: 41377 - RNA, 21 nt, Artificial Sequence
  RPE65 RNA guide
uugaguucccaccuucaugca

SEQ ID NO: 41378 - RNA, 21 nt, Artificial Sequence
  RPE65 RNA guide
uugauguauaccauacagugc

SEQ ID NO: 41379 - RNA, 21 nt, Artificial Sequence
  RPE65 RNA guide
uugcacaugguacuguaugag

SEQ ID NO: 41380 - RNA, 21 nt, Artificial Sequence
  RPE65 RNA guide
uuggaacugaaagggacuuca

SEQ ID NO: 41381 - RNA, 21 nt, Artificial Sequence
  RPE65 RNA guide
uugguauuuacauaguaccau

SEQ ID NO: 41382 - RNA, 21 nt, Artificial Sequence
  RPE65 RNA guide
uugucccuaggucugagguca

SEQ ID NO: 41383 - RNA, 21 nt, Artificial Sequence
  RPE65 RNA guide
uuuagcauaugcagauugacc

SEQ ID NO: 41384 - RNA, 21 nt, Artificial Sequence
  RPE65 RNA guide
uuucaccuugaguucccaccu

SEQ ID NO: 41385 - RNA, 21 nt, Artificial Sequence
  RPE65 RNA guide
uuucaggucaaucugcauaug

SEQ ID NO: 41386 - RNA, 21 nt, Artificial Sequence
  RPE65 RNA guide
uuucaguuccaaacucauaca

SEQ ID NO: 41387 - RNA, 21 nt, Artificial Sequence
  RPE65 RNA guide
uuucguaugguacuauguaaa

SEQ ID NO: 41388 - RNA, 21 nt, Artificial Sequence
  RPE65 RNA guide
uuucuauacuagaugaagcuu

SEQ ID NO: 41389 - RNA, 21 nt, Artificial Sequence
  RPE65 RNA guide
uuucuucccaucucucuggau

SEQ ID NO: 41390 - RNA, 21 nt, Artificial Sequence
  RPE65 RNA guide
uuucuuuuagcauaugcagau

SEQ ID NO: 41391 - RNA, 21 nt, Artificial Sequence
  RPE65 RNA guide
uuugaguccucagacuucuuu

SEQ ID NO: 41392 - RNA, 21 nt, Artificial Sequence
  RPE65 RNA guide
uuugauguauaccauacagug

SEQ ID NO: 41393 - RNA, 21 nt, Artificial Sequence
  RPE65 RNA guide
uuuggaacugaaagggacuuc

SEQ ID NO: 41394 - RNA, 21 nt, Artificial Sequence
  RPE65 RNA guide
uuugucccuaggucugagguc

SEQ ID NO: 41395 - RNA, 21 nt, Artificial Sequence
  RPE65 RNA guide
uuuuagcauaugcagauugac

SEQ ID NO: 41396 - RNA, 22 nt, Artificial Sequence
  RPE65 RNA guide
aaaagaaaaguaacuaaccaga

SEQ ID NO: 41397 - RNA, 22 nt, Artificial Sequence
  RPE65 RNA guide
aaaaguaacuaaccagagcacu

SEQ ID NO: 41398 - RNA, 22 nt, Artificial Sequence
  RPE65 RNA guide
aaaccauaaguuugaguccuca

SEQ ID NO: 41399 - RNA, 22 nt, Artificial Sequence
  RPE65 RNA guide
aaacucauacaguaccaugugc

SEQ ID NO: 41400 - RNA, 22 nt, Artificial Sequence
  RPE65 RNA guide
aaacuuaugguuucaggucaau

SEQ ID NO: 41401 - RNA, 22 nt, Artificial Sequence
  RPE65 RNA guide
aaagaaaaguaacuaaccagag

SEQ ID NO: 41402 - RNA, 22 nt, Artificial Sequence
  RPE65 RNA guide
aaagaagucugaggacucaaac

SEQ ID NO: 41403 - RNA, 22 nt, Artificial Sequence
  RPE65 RNA guide
aaagagaagugcacuuaggaug

SEQ ID NO: 41404 - RNA, 22 nt, Artificial Sequence
  RPE65 RNA guide
aaagagaugucacagguaacuc

SEQ ID NO: 41405 - RNA, 22 nt, Artificial Sequence
  RPE65 RNA guide
aaagaggguagaauccagagag

SEQ ID NO: 41406 - RNA, 22 nt, Artificial Sequence
  RPE65 RNA guide
aaagggacuucaagcuucaucu

SEQ ID NO: 41407 - RNA, 22 nt, Artificial Sequence
  RPE65 RNA guide
aaagguauaauguaucuuccuu

SEQ ID NO: 41408 - RNA, 22 nt, Artificial Sequence
  RPE65 RNA guide
aaaguaacuaaccagagcacug

SEQ ID NO: 41409 - RNA, 22 nt, Artificial Sequence
  RPE65 RNA guide
aaagugaauguccuccaguuga

SEQ ID NO: 41410 - RNA, 22 nt, Artificial Sequence
  RPE65 RNA guide
aaauaaagagaugucacaggua

SEQ ID NO: 41411 - RNA, 22 nt, Artificial Sequence
  RPE65 RNA guide
aaauaccaacuauaugucuugc

SEQ ID NO: 41412 - RNA, 22 nt, Artificial Sequence
  RPE65 RNA guide
aaaugucaauuucguaugguac

SEQ ID NO: 41413 - RNA, 22 nt, Artificial Sequence
  RPE65 RNA guide
aacauaaugcccccucaugugu

SEQ ID NO: 41414 - RNA, 22 nt, Artificial Sequence
  RPE65 RNA guide
aaccagagcacuguaugguaua

SEQ ID NO: 41415 - RNA, 22 nt, Artificial Sequence
  RPE65 RNA guide
aaccauaaguuugaguccucag

SEQ ID NO: 41416 - RNA, 22 nt, Artificial Sequence
  RPE65 RNA guide
aacuaaccagagcacuguaugg

SEQ ID NO: 41417 - RNA, 22 nt, Artificial Sequence
  RPE65 RNA guide
aacuauaugucuugcacauggu

SEQ ID NO: 41418 - RNA, 22 nt, Artificial Sequence
  RPE65 RNA guide
aacucaaggugaaagaggguag

SEQ ID NO: 41419 - RNA, 22 nt, Artificial Sequence
  RPE65 RNA guide
aacucauacaguaccaugugca

SEQ ID NO: 41420 - RNA, 22 nt, Artificial Sequence
  RPE65 RNA guide
aacuccagauucagacacauga

SEQ ID NO: 41421 - RNA, 22 nt, Artificial Sequence
  RPE65 RNA guide
aacucucauccuaagugcacuu

SEQ ID NO: 41422 - RNA, 22 nt, Artificial Sequence
  RPE65 RNA guide
aacugaaagggacuucaagcuu

SEQ ID NO: 41423 - RNA, 22 nt, Artificial Sequence
  RPE65 RNA guide
aacuggaggacauucacuuuac

SEQ ID NO: 41424 - RNA, 22 nt, Artificial Sequence
  RPE65 RNA guide
aacuuaugguuucaggucaauc

SEQ ID NO: 41425 - RNA, 22 nt, Artificial Sequence
  RPE65 RNA guide
aagaaaaguaacuaaccagagc

SEQ ID NO: 41426 - RNA, 22 nt, Artificial Sequence
  RPE65 RNA guide
aagaaagagaagugcacuuagg

SEQ ID NO: 41427 - RNA, 22 nt, Artificial Sequence
  RPE65 RNA guide
aagaagucugaggacucaaacu

SEQ ID NO: 41428 - RNA, 22 nt, Artificial Sequence
  RPE65 RNA guide
aagagaagugcacuuaggauga

SEQ ID NO: 41429 - RNA, 22 nt, Artificial Sequence
  RPE65 RNA guide
aagagaugucacagguaacucc

SEQ ID NO: 41430 - RNA, 22 nt, Artificial Sequence
  RPE65 RNA guide
aagaggguagaauccagagaga

SEQ ID NO: 41431 - RNA, 22 nt, Artificial Sequence
  RPE65 RNA guide
aagaguauaaagaagucugagg

SEQ ID NO: 41432 - RNA, 22 nt, Artificial Sequence
  RPE65 RNA guide
aagauacauuauaccuuugucc

SEQ ID NO: 41433 - RNA, 22 nt, Artificial Sequence
  RPE65 RNA guide
aagcuugaagucccuuucaguu

SEQ ID NO: 41434 - RNA, 22 nt, Artificial Sequence
  RPE65 RNA guide
aaggaagauacauuauaccuuu

SEQ ID NO: 41435 - RNA, 22 nt, Artificial Sequence
  RPE65 RNA guide
aagggacuucaagcuucaucua

SEQ ID NO: 41436 - RNA, 22 nt, Artificial Sequence
  RPE65 RNA guide
aagggguagugaugaccucaga

SEQ ID NO: 41437 - RNA, 22 nt, Artificial Sequence
  RPE65 RNA guide
aagguauaauguaucuuccuuc

SEQ ID NO: 41438 - RNA, 22 nt, Artificial Sequence
  RPE65 RNA guide
aaggugaaagaggguagaaucc

SEQ ID NO: 41439 - RNA, 22 nt, Artificial Sequence
  RPE65 RNA guide
aaggugggaacucaaggugaaa

SEQ ID NO: 41440 - RNA, 22 nt, Artificial Sequence
  RPE65 RNA guide
aaguaaagugaauguccuccag

SEQ ID NO: 41441 - RNA, 22 nt, Artificial Sequence
  RPE65 RNA guide
aaguaacuaaccagagcacugu

SEQ ID NO: 41442 - RNA, 22 nt, Artificial Sequence
  RPE65 RNA guide
aagucccuuucaguuccaaacu

SEQ ID NO: 41443 - RNA, 22 nt, Artificial Sequence
  RPE65 RNA guide
aagucugaggacucaaacuuau

SEQ ID NO: 41444 - RNA, 22 nt, Artificial Sequence
  RPE65 RNA guide
aagugaauguccuccaguugag

SEQ ID NO: 41445 - RNA, 22 nt, Artificial Sequence
  RPE65 RNA guide
aagugcacuuaggaugagaguu

SEQ ID NO: 41446 - RNA, 22 nt, Artificial Sequence
  RPE65 RNA guide
aagugcacuucucuuucuuccc

SEQ ID NO: 41447 - RNA, 22 nt, Artificial Sequence
  RPE65 RNA guide
aaguuugaguccucagacuucu

SEQ ID NO: 41448 - RNA, 22 nt, Artificial Sequence
  RPE65 RNA guide
aauaaagagaugucacagguaa

SEQ ID NO: 41449 - RNA, 22 nt, Artificial Sequence
  RPE65 RNA guide
aauaagaguauaaagaagucug

SEQ ID NO: 41450 - RNA, 22 nt, Artificial Sequence
  RPE65 RNA guide
aauaccaacuauaugucuugca

SEQ ID NO: 41451 - RNA, 22 nt, Artificial Sequence
  RPE65 RNA guide
aauccagagagaugggaagaaa

SEQ ID NO: 41452 - RNA, 22 nt, Artificial Sequence
  RPE65 RNA guide
aaucuggaguuaccugugacau

SEQ ID NO: 41453 - RNA, 22 nt, Artificial Sequence
  RPE65 RNA guide
aaugcccccucaugugucugaa

SEQ ID NO: 41454 - RNA, 22 nt, Artificial Sequence
  RPE65 RNA guide
aauguaucuuccuucucucaac

SEQ ID NO: 41455 - RNA, 22 nt, Artificial Sequence
  RPE65 RNA guide
aaugucaauuucguaugguacu

SEQ ID NO: 41456 - RNA, 22 nt, Artificial Sequence
  RPE65 RNA guide
aauguccuccaguugagagaag

SEQ ID NO: 41457 - RNA, 22 nt, Artificial Sequence
  RPE65 RNA guide
acaaagguauaauguaucuucc

SEQ ID NO: 41458 - RNA, 22 nt, Artificial Sequence
  RPE65 RNA guide
acacaugagggggcauuauguu

SEQ ID NO: 41459 - RNA, 22 nt, Artificial Sequence
  RPE65 RNA guide
acagguaacuccagauucagac

SEQ ID NO: 41460 - RNA, 22 nt, Artificial Sequence
  RPE65 RNA guide
acaguaccaugugcaagacaua

SEQ ID NO: 41461 - RNA, 22 nt, Artificial Sequence
  RPE65 RNA guide
acagugcucugguuaguuacuu

SEQ ID NO: 41462 - RNA, 22 nt, Artificial Sequence
  RPE65 RNA guide
acauaaugcccccucauguguc

SEQ ID NO: 41463 - RNA, 22 nt, Artificial Sequence
  RPE65 RNA guide
acauaguaccauacgaaauuga

SEQ ID NO: 41464 - RNA, 22 nt, Artificial Sequence
  RPE65 RNA guide
acaucaaauaaagagaugucac

SEQ ID NO: 41465 - RNA, 22 nt, Artificial Sequence
  RPE65 RNA guide
acaugagggggcauuauguucu

SEQ ID NO: 41466 - RNA, 22 nt, Artificial Sequence
  RPE65 RNA guide
acaugguacuguaugaguuugg

SEQ ID NO: 41467 - RNA, 22 nt, Artificial Sequence
  RPE65 RNA guide
acauuauaccuuugucccuagg

SEQ ID NO: 41468 - RNA, 22 nt, Artificial Sequence
  RPE65 RNA guide
accaacuauaugucuugcacau

SEQ ID NO: 41469 - RNA, 22 nt, Artificial Sequence
  RPE65 RNA guide
accagagcacuguaugguauac

SEQ ID NO: 41470 - RNA, 22 nt, Artificial Sequence
  RPE65 RNA guide
accauaaguuugaguccucaga

SEQ ID NO: 41471 - RNA, 22 nt, Artificial Sequence
  RPE65 RNA guide
accauacagugcucugguuagu

SEQ ID NO: 41472 - RNA, 22 nt, Artificial Sequence
  RPE65 RNA guide
accauacgaaauugacauuuuu

SEQ ID NO: 41473 - RNA, 22 nt, Artificial Sequence
  RPE65 RNA guide
accaugugcaagacauauaguu

SEQ ID NO: 41474 - RNA, 22 nt, Artificial Sequence
  RPE65 RNA guide
accccuugaacucucauccuaa

SEQ ID NO: 41475 - RNA, 22 nt, Artificial Sequence
  RPE65 RNA guide
acccucuuucaccuugaguucc

SEQ ID NO: 41476 - RNA, 22 nt, Artificial Sequence
  RPE65 RNA guide
accuagggacaaagguauaaug

SEQ ID NO: 41477 - RNA, 22 nt, Artificial Sequence
  RPE65 RNA guide
accucagaccuagggacaaagg

SEQ ID NO: 41478 - RNA, 22 nt, Artificial Sequence
  RPE65 RNA guide
accugaaaccauaaguuugagu

SEQ ID NO: 41479 - RNA, 22 nt, Artificial Sequence
  RPE65 RNA guide
accugugacaucucuuuauuug

SEQ ID NO: 41480 - RNA, 22 nt, Artificial Sequence
  RPE65 RNA guide
accuucaugcagaacauaaugc

SEQ ID NO: 41481 - RNA, 22 nt, Artificial Sequence
  RPE65 RNA guide
accuugaguucccaccuucaug

SEQ ID NO: 41482 - RNA, 22 nt, Artificial Sequence
  RPE65 RNA guide
accuuugucccuaggucugagg

SEQ ID NO: 41483 - RNA, 22 nt, Artificial Sequence
  RPE65 RNA guide
acgaaauugacauuuuuggaaa

SEQ ID NO: 41484 - RNA, 22 nt, Artificial Sequence
  RPE65 RNA guide
acggaaguaaagugaauguccu

SEQ ID NO: 41485 - RNA, 22 nt, Artificial Sequence
  RPE65 RNA guide
acuaaccagagcacuguauggu

SEQ ID NO: 41486 - RNA, 22 nt, Artificial Sequence
  RPE65 RNA guide
acuaccccuugaacucucaucc

SEQ ID NO: 41487 - RNA, 22 nt, Artificial Sequence
  RPE65 RNA guide
acuagaugaagcuugaaguccc

SEQ ID NO: 41488 - RNA, 22 nt, Artificial Sequence
  RPE65 RNA guide
acuauaugucuugcacauggua

SEQ ID NO: 41489 - RNA, 22 nt, Artificial Sequence
  RPE65 RNA guide
acucaaacuuaugguuucaggu

SEQ ID NO: 41490 - RNA, 22 nt, Artificial Sequence
  RPE65 RNA guide
acucaaggugaaagaggguaga

SEQ ID NO: 41491 - RNA, 22 nt, Artificial Sequence
  RPE65 RNA guide
acucauacaguaccaugugcaa

SEQ ID NO: 41492 - RNA, 22 nt, Artificial Sequence
  RPE65 RNA guide
acuccagauucagacacaugag

SEQ ID NO: 41493 - RNA, 22 nt, Artificial Sequence
  RPE65 RNA guide
acucucauccuaagugcacuuc

SEQ ID NO: 41494 - RNA, 22 nt, Artificial Sequence
  RPE65 RNA guide
acugaaagggacuucaagcuuc

SEQ ID NO: 41495 - RNA, 22 nt, Artificial Sequence
  RPE65 RNA guide
acuggaggacauucacuuuacu

SEQ ID NO: 41496 - RNA, 22 nt, Artificial Sequence
  RPE65 RNA guide
acuguaugaguuuggaacugaa

SEQ ID NO: 41497 - RNA, 22 nt, Artificial Sequence
  RPE65 RNA guide
acuuaggaugagaguucaaggg

SEQ ID NO: 41498 - RNA, 22 nt, Artificial Sequence
  RPE65 RNA guide
acuuaugguuucaggucaaucu

SEQ ID NO: 41499 - RNA, 22 nt, Artificial Sequence
  RPE65 RNA guide
acuucaagcuucaucuaguaua

SEQ ID NO: 41500 - RNA, 22 nt, Artificial Sequence
  RPE65 RNA guide
acuucucuuucuucccaucucu

SEQ ID NO: 41501 - RNA, 22 nt, Artificial Sequence
  RPE65 RNA guide
acuuucuauacuagaugaagcu

SEQ ID NO: 41502 - RNA, 22 nt, Artificial Sequence
  RPE65 RNA guide
acuuuucuuuuagcauaugcag

SEQ ID NO: 41503 - RNA, 22 nt, Artificial Sequence
  RPE65 RNA guide
agaaaaguaacuaaccagagca

SEQ ID NO: 41504 - RNA, 22 nt, Artificial Sequence
  RPE65 RNA guide
agaaagagaagugcacuuagga

SEQ ID NO: 41505 - RNA, 22 nt, Artificial Sequence
  RPE65 RNA guide
agaacauaaugcccccucaugu

SEQ ID NO: 41506 - RNA, 22 nt, Artificial Sequence
  RPE65 RNA guide
agaaggaagauacauuauaccu

SEQ ID NO: 41507 - RNA, 22 nt, Artificial Sequence
  RPE65 RNA guide
agaagucugaggacucaaacuu

SEQ ID NO: 41508 - RNA, 22 nt, Artificial Sequence
  RPE65 RNA guide
agaagugcacuuaggaugagag

SEQ ID NO: 41509 - RNA, 22 nt, Artificial Sequence
  RPE65 RNA guide
agaauccagagagaugggaaga

SEQ ID NO: 41510 - RNA, 22 nt, Artificial Sequence
  RPE65 RNA guide
agacacaugagggggcauuaug

SEQ ID NO: 41511 - RNA, 22 nt, Artificial Sequence
  RPE65 RNA guide
agaccuagggacaaagguauaa

SEQ ID NO: 41512 - RNA, 22 nt, Artificial Sequence
  RPE65 RNA guide
agagaaggaagauacauuauac

SEQ ID NO: 41513 - RNA, 22 nt, Artificial Sequence
  RPE65 RNA guide
agagaagugcacuuaggaugag

SEQ ID NO: 41514 - RNA, 22 nt, Artificial Sequence
  RPE65 RNA guide
agagagaugggaagaaagagaa

SEQ ID NO: 41515 - RNA, 22 nt, Artificial Sequence
  RPE65 RNA guide
agagaugggaagaaagagaagu

SEQ ID NO: 41516 - RNA, 22 nt, Artificial Sequence
  RPE65 RNA guide
agagaugucacagguaacucca

SEQ ID NO: 41517 - RNA, 22 nt, Artificial Sequence
  RPE65 RNA guide
agagcacuguaugguauacauc

SEQ ID NO: 41518 - RNA, 22 nt, Artificial Sequence
  RPE65 RNA guide
agaggguagaauccagagagau

SEQ ID NO: 41519 - RNA, 22 nt, Artificial Sequence
  RPE65 RNA guide
agaguauaaagaagucugagga

SEQ ID NO: 41520 - RNA, 22 nt, Artificial Sequence
  RPE65 RNA guide
agaguucaagggguagugauga

SEQ ID NO: 41521 - RNA, 22 nt, Artificial Sequence
  RPE65 RNA guide
agauacauuauaccuuuguccc

SEQ ID NO: 41522 - RNA, 22 nt, Artificial Sequence
  RPE65 RNA guide
agaugaagcuugaagucccuuu

SEQ ID NO: 41523 - RNA, 22 nt, Artificial Sequence
  RPE65 RNA guide
agaugggaagaaagagaagugc

SEQ ID NO: 41524 - RNA, 22 nt, Artificial Sequence
  RPE65 RNA guide
agaugucacagguaacuccaga

SEQ ID NO: 41525 - RNA, 22 nt, Artificial Sequence
  RPE65 RNA guide
agauucagacacaugagggggc

SEQ ID NO: 41526 - RNA, 22 nt, Artificial Sequence
  RPE65 RNA guide
agauugaccugaaaccauaagu

SEQ ID NO: 41527 - RNA, 22 nt, Artificial Sequence
  RPE65 RNA guide
agcacuguaugguauacaucaa

SEQ ID NO: 41528 - RNA, 22 nt, Artificial Sequence
  RPE65 RNA guide
agcauaugcagauugaccugaa

SEQ ID NO: 41529 - RNA, 22 nt, Artificial Sequence
  RPE65 RNA guide
agcuugaagucccuuucaguuc

SEQ ID NO: 41530 - RNA, 22 nt, Artificial Sequence
  RPE65 RNA guide
aggaagauacauuauaccuuug

SEQ ID NO: 41531 - RNA, 22 nt, Artificial Sequence
  RPE65 RNA guide
aggacucaaacuuaugguuuca

SEQ ID NO: 41532 - RNA, 22 nt, Artificial Sequence
  RPE65 RNA guide
aggaugagaguucaagggguag

SEQ ID NO: 41533 - RNA, 22 nt, Artificial Sequence
  RPE65 RNA guide
agggacaaagguauaauguauc

SEQ ID NO: 41534 - RNA, 22 nt, Artificial Sequence
  RPE65 RNA guide
agggacuucaagcuucaucuag

SEQ ID NO: 41535 - RNA, 22 nt, Artificial Sequence
  RPE65 RNA guide
agggggcauuauguucugcaug

SEQ ID NO: 41536 - RNA, 22 nt, Artificial Sequence
  RPE65 RNA guide
agggguagugaugaccucagac

SEQ ID NO: 41537 - RNA, 22 nt, Artificial Sequence
  RPE65 RNA guide
aggguagaauccagagagaugg

SEQ ID NO: 41538 - RNA, 22 nt, Artificial Sequence
  RPE65 RNA guide
agguaacuccagauucagacac

SEQ ID NO: 41539 - RNA, 22 nt, Artificial Sequence
  RPE65 RNA guide
agguauaauguaucuuccuucu

SEQ ID NO: 41540 - RNA, 22 nt, Artificial Sequence
  RPE65 RNA guide
aggucaaucugcauaugcuaaa

SEQ ID NO: 41541 - RNA, 22 nt, Artificial Sequence
  RPE65 RNA guide
aggucaucacuaccccuugaac

SEQ ID NO: 41542 - RNA, 22 nt, Artificial Sequence
  RPE65 RNA guide
aggucugaggucaucacuaccc

SEQ ID NO: 41543 - RNA, 22 nt, Artificial Sequence
  RPE65 RNA guide
aggugaaagaggguagaaucca

SEQ ID NO: 41544 - RNA, 22 nt, Artificial Sequence
  RPE65 RNA guide
aggugggaacucaaggugaaag

SEQ ID NO: 41545 - RNA, 22 nt, Artificial Sequence
  RPE65 RNA guide
aguaaagugaauguccuccagu

SEQ ID NO: 41546 - RNA, 22 nt, Artificial Sequence
  RPE65 RNA guide
aguaacuaaccagagcacugua

SEQ ID NO: 41547 - RNA, 22 nt, Artificial Sequence
  RPE65 RNA guide
aguaccauacgaaauugacauu

SEQ ID NO: 41548 - RNA, 22 nt, Artificial Sequence
  RPE65 RNA guide
aguaccaugugcaagacauaua

SEQ ID NO: 41549 - RNA, 22 nt, Artificial Sequence
  RPE65 RNA guide
aguauaaagaagucugaggacu

SEQ ID NO: 41550 - RNA, 22 nt, Artificial Sequence
  RPE65 RNA guide
agucccuuucaguuccaaacuc

SEQ ID NO: 41551 - RNA, 22 nt, Artificial Sequence
  RPE65 RNA guide
aguccucagacuucuuuauacu

SEQ ID NO: 41552 - RNA, 22 nt, Artificial Sequence
  RPE65 RNA guide
agucugaggacucaaacuuaug

SEQ ID NO: 41553 - RNA, 22 nt, Artificial Sequence
  RPE65 RNA guide
agugaauguccuccaguugaga

SEQ ID NO: 41554 - RNA, 22 nt, Artificial Sequence
  RPE65 RNA guide
agugaugaccucagaccuaggg

SEQ ID NO: 41555 - RNA, 22 nt, Artificial Sequence
  RPE65 RNA guide
agugcacuuaggaugagaguuc

SEQ ID NO: 41556 - RNA, 22 nt, Artificial Sequence
  RPE65 RNA guide
agugcacuucucuuucuuccca

SEQ ID NO: 41557 - RNA, 22 nt, Artificial Sequence
  RPE65 RNA guide
agugcucugguuaguuacuuuu

SEQ ID NO: 41558 - RNA, 22 nt, Artificial Sequence
  RPE65 RNA guide
aguuaccugugacaucucuuua

SEQ ID NO: 41559 - RNA, 22 nt, Artificial Sequence
  RPE65 RNA guide
aguuacuuuucuuuuagcauau

SEQ ID NO: 41560 - RNA, 22 nt, Artificial Sequence
  RPE65 RNA guide
aguucaagggguagugaugacc

SEQ ID NO: 41561 - RNA, 22 nt, Artificial Sequence
  RPE65 RNA guide
aguuccaaacucauacaguacc

SEQ ID NO: 41562 - RNA, 22 nt, Artificial Sequence
  RPE65 RNA guide
aguucccaccuucaugcagaac

SEQ ID NO: 41563 - RNA, 22 nt, Artificial Sequence
  RPE65 RNA guide
aguugagagaaggaagauacau

SEQ ID NO: 41564 - RNA, 22 nt, Artificial Sequence
  RPE65 RNA guide
aguugguauuuacauaguacca

SEQ ID NO: 41565 - RNA, 22 nt, Artificial Sequence
  RPE65 RNA guide
aguuugaguccucagacuucuu

SEQ ID NO: 41566 - RNA, 22 nt, Artificial Sequence
  RPE65 RNA guide
aguuuggaacugaaagggacuu

SEQ ID NO: 41567 - RNA, 22 nt, Artificial Sequence
  RPE65 RNA guide
auaaagaagucugaggacucaa

SEQ ID NO: 41568 - RNA, 22 nt, Artificial Sequence
  RPE65 RNA guide
auaaagagaugucacagguaac

SEQ ID NO: 41569 - RNA, 22 nt, Artificial Sequence
  RPE65 RNA guide
auaagaguauaaagaagucuga

SEQ ID NO: 41570 - RNA, 22 nt, Artificial Sequence
  RPE65 RNA guide
auaaguuugaguccucagacuu

SEQ ID NO: 41571 - RNA, 22 nt, Artificial Sequence
  RPE65 RNA guide
auaaugcccccucaugugucug

SEQ ID NO: 41572 - RNA, 22 nt, Artificial Sequence
  RPE65 RNA guide
auaauguaucuuccuucucuca

SEQ ID NO: 41573 - RNA, 22 nt, Artificial Sequence
  RPE65 RNA guide
auacaguaccaugugcaagaca

SEQ ID NO: 41574 - RNA, 22 nt, Artificial Sequence
  RPE65 RNA guide
auacagugcucugguuaguuac

SEQ ID NO: 41575 - RNA, 22 nt, Artificial Sequence
  RPE65 RNA guide
auacaucaaauaaagagauguc

SEQ ID NO: 41576 - RNA, 22 nt, Artificial Sequence
  RPE65 RNA guide
auacauuauaccuuugucccua

SEQ ID NO: 41577 - RNA, 22 nt, Artificial Sequence
  RPE65 RNA guide
auaccaacuauaugucuugcac

SEQ ID NO: 41578 - RNA, 22 nt, Artificial Sequence
  RPE65 RNA guide
auaccauacagugcucugguua

SEQ ID NO: 41579 - RNA, 22 nt, Artificial Sequence
  RPE65 RNA guide
auaccuuugucccuaggucuga

SEQ ID NO: 41580 - RNA, 22 nt, Artificial Sequence
  RPE65 RNA guide
auacuagaugaagcuugaaguc

SEQ ID NO: 41581 - RNA, 22 nt, Artificial Sequence
  RPE65 RNA guide
auaugcagauugaccugaaacc

SEQ ID NO: 41582 - RNA, 22 nt, Artificial Sequence
  RPE65 RNA guide
auaugucuugcacaugguacug

SEQ ID NO: 41583 - RNA, 22 nt, Artificial Sequence
  RPE65 RNA guide
aucaaauaaagagaugucacag

SEQ ID NO: 41584 - RNA, 22 nt, Artificial Sequence
  RPE65 RNA guide
aucacuaccccuugaacucuca

SEQ ID NO: 41585 - RNA, 22 nt, Artificial Sequence
  RPE65 RNA guide
auccagagagaugggaagaaag

SEQ ID NO: 41586 - RNA, 22 nt, Artificial Sequence
  RPE65 RNA guide
auccuaagugcacuucucuuuc

SEQ ID NO: 41587 - RNA, 22 nt, Artificial Sequence
  RPE65 RNA guide
aucucucuggauucuacccucu

SEQ ID NO: 41588 - RNA, 22 nt, Artificial Sequence
  RPE65 RNA guide
aucuggaguuaccugugacauc

SEQ ID NO: 41589 - RNA, 22 nt, Artificial Sequence
  RPE65 RNA guide
aucuuccuucucucaacuggag

SEQ ID NO: 41590 - RNA, 22 nt, Artificial Sequence
  RPE65 RNA guide
augaagcuugaagucccuuuca

SEQ ID NO: 41591 - RNA, 22 nt, Artificial Sequence
  RPE65 RNA guide
augaaggugggaacucaaggug

SEQ ID NO: 41592 - RNA, 22 nt, Artificial Sequence
  RPE65 RNA guide
augaccucagaccuagggacaa

SEQ ID NO: 41593 - RNA, 22 nt, Artificial Sequence
  RPE65 RNA guide
augagaguucaagggguaguga

SEQ ID NO: 41594 - RNA, 22 nt, Artificial Sequence
  RPE65 RNA guide
augagggggcauuauguucugc

SEQ ID NO: 41595 - RNA, 22 nt, Artificial Sequence
  RPE65 RNA guide
augaguuuggaacugaaaggga

SEQ ID NO: 41596 - RNA, 22 nt, Artificial Sequence
  RPE65 RNA guide
augcagaacauaaugcccccuc

SEQ ID NO: 41597 - RNA, 22 nt, Artificial Sequence
  RPE65 RNA guide
augcagauugaccugaaaccau

SEQ ID NO: 41598 - RNA, 22 nt, Artificial Sequence
  RPE65 RNA guide
augcccccucaugugucugaau

SEQ ID NO: 41599 - RNA, 22 nt, Artificial Sequence
  RPE65 RNA guide
augcuaaaagaaaaguaacuaa

SEQ ID NO: 41600 - RNA, 22 nt, Artificial Sequence
  RPE65 RNA guide
augggaagaaagagaagugcac

SEQ ID NO: 41601 - RNA, 22 nt, Artificial Sequence
  RPE65 RNA guide
augguacuguaugaguuuggaa

SEQ ID NO: 41602 - RNA, 22 nt, Artificial Sequence
  RPE65 RNA guide
augguuucaggucaaucugcau

SEQ ID NO: 41603 - RNA, 22 nt, Artificial Sequence
  RPE65 RNA guide
auguaaauaccaacuauauguc

SEQ ID NO: 41604 - RNA, 22 nt, Artificial Sequence
  RPE65 RNA guide
auguauaccauacagugcucug

SEQ ID NO: 41605 - RNA, 22 nt, Artificial Sequence
  RPE65 RNA guide
auguaucuuccuucucucaacu

SEQ ID NO: 41606 - RNA, 22 nt, Artificial Sequence
  RPE65 RNA guide
augucaauuucguaugguacua

SEQ ID NO: 41607 - RNA, 22 nt, Artificial Sequence
  RPE65 RNA guide
augucacagguaacuccagauu

SEQ ID NO: 41608 - RNA, 22 nt, Artificial Sequence
  RPE65 RNA guide
auguccuccaguugagagaagg

SEQ ID NO: 41609 - RNA, 22 nt, Artificial Sequence
  RPE65 RNA guide
augucuugcacaugguacugua

SEQ ID NO: 41610 - RNA, 22 nt, Artificial Sequence
  RPE65 RNA guide
augugcaagacauauaguuggu

SEQ ID NO: 41611 - RNA, 22 nt, Artificial Sequence
  RPE65 RNA guide
augugucugaaucuggaguuac

SEQ ID NO: 41612 - RNA, 22 nt, Artificial Sequence
  RPE65 RNA guide
auguucugcaugaaggugggaa

SEQ ID NO: 41613 - RNA, 22 nt, Artificial Sequence
  RPE65 RNA guide
auuauaccuuugucccuagguc

SEQ ID NO: 41614 - RNA, 22 nt, Artificial Sequence
  RPE65 RNA guide
auuauguucugcaugaaggugg

SEQ ID NO: 41615 - RNA, 22 nt, Artificial Sequence
  RPE65 RNA guide
auucagacacaugagggggcau

SEQ ID NO: 41616 - RNA, 22 nt, Artificial Sequence
  RPE65 RNA guide
auucuacccucuuucaccuuga

SEQ ID NO: 41617 - RNA, 22 nt, Artificial Sequence
  RPE65 RNA guide
auugaccugaaaccauaaguuu

SEQ ID NO: 41618 - RNA, 22 nt, Artificial Sequence
  RPE65 RNA guide
auuucguaugguacuauguaaa

SEQ ID NO: 41619 - RNA, 22 nt, Artificial Sequence
  RPE65 RNA guide
auuugauguauaccauacagug

SEQ ID NO: 41620 - RNA, 22 nt, Artificial Sequence
  RPE65 RNA guide
caaaaaugucaauuucguaugg

SEQ ID NO: 41621 - RNA, 22 nt, Artificial Sequence
  RPE65 RNA guide
caaacucauacaguaccaugug

SEQ ID NO: 41622 - RNA, 22 nt, Artificial Sequence
  RPE65 RNA guide
caaacuuaugguuucaggucaa

SEQ ID NO: 41623 - RNA, 22 nt, Artificial Sequence
  RPE65 RNA guide
caaagguauaauguaucuuccu

SEQ ID NO: 41624 - RNA, 22 nt, Artificial Sequence
  RPE65 RNA guide
caaauaaagagaugucacaggu

SEQ ID NO: 41625 - RNA, 22 nt, Artificial Sequence
  RPE65 RNA guide
caacuauaugucuugcacaugg

SEQ ID NO: 41626 - RNA, 22 nt, Artificial Sequence
  RPE65 RNA guide
caacuggaggacauucacuuua

SEQ ID NO: 41627 - RNA, 22 nt, Artificial Sequence
  RPE65 RNA guide
caagggguagugaugaccucag

SEQ ID NO: 41628 - RNA, 22 nt, Artificial Sequence
  RPE65 RNA guide
caaggugaaagaggguagaauc

SEQ ID NO: 41629 - RNA, 22 nt, Artificial Sequence
  RPE65 RNA guide
caaucugcauaugcuaaaagaa

SEQ ID NO: 41630 - RNA, 22 nt, Artificial Sequence
  RPE65 RNA guide
cacagguaacuccagauucaga

SEQ ID NO: 41631 - RNA, 22 nt, Artificial Sequence
  RPE65 RNA guide
cacaugagggggcauuauguuc

SEQ ID NO: 41632 - RNA, 22 nt, Artificial Sequence
  RPE65 RNA guide
cacaugguacuguaugaguuug

SEQ ID NO: 41633 - RNA, 22 nt, Artificial Sequence
  RPE65 RNA guide
caccuucaugcagaacauaaug

SEQ ID NO: 41634 - RNA, 22 nt, Artificial Sequence
  RPE65 RNA guide
caccuugaguucccaccuucau

SEQ ID NO: 41635 - RNA, 22 nt, Artificial Sequence
  RPE65 RNA guide
cacuaccccuugaacucucauc

SEQ ID NO: 41636 - RNA, 22 nt, Artificial Sequence
  RPE65 RNA guide
cacuguaugguauacaucaaau

SEQ ID NO: 41637 - RNA, 22 nt, Artificial Sequence
  RPE65 RNA guide
cacuuaggaugagaguucaagg

SEQ ID NO: 41638 - RNA, 22 nt, Artificial Sequence
  RPE65 RNA guide
cacuucucuuucuucccaucuc

SEQ ID NO: 41639 - RNA, 22 nt, Artificial Sequence
  RPE65 RNA guide
cagaacauaaugcccccucaug

SEQ ID NO: 41640 - RNA, 22 nt, Artificial Sequence
  RPE65 RNA guide
cagacacaugagggggcauuau

SEQ ID NO: 41641 - RNA, 22 nt, Artificial Sequence
  RPE65 RNA guide
cagaccuagggacaaagguaua

SEQ ID NO: 41642 - RNA, 22 nt, Artificial Sequence
  RPE65 RNA guide
cagagagaugggaagaaagaga

SEQ ID NO: 41643 - RNA, 22 nt, Artificial Sequence
  RPE65 RNA guide
cagagcacuguaugguauacau

SEQ ID NO: 41644 - RNA, 22 nt, Artificial Sequence
  RPE65 RNA guide
cagauucagacacaugaggggg

SEQ ID NO: 41645 - RNA, 22 nt, Artificial Sequence
  RPE65 RNA guide
cagauugaccugaaaccauaag

SEQ ID NO: 41646 - RNA, 22 nt, Artificial Sequence
  RPE65 RNA guide
cagguaacuccagauucagaca

SEQ ID NO: 41647 - RNA, 22 nt, Artificial Sequence
  RPE65 RNA guide
caggucaaucugcauaugcuaa

SEQ ID NO: 41648 - RNA, 22 nt, Artificial Sequence
  RPE65 RNA guide
caguaccaugugcaagacauau

SEQ ID NO: 41649 - RNA, 22 nt, Artificial Sequence
  RPE65 RNA guide
cagugcucugguuaguuacuuu

SEQ ID NO: 41650 - RNA, 22 nt, Artificial Sequence
  RPE65 RNA guide
caguuccaaacucauacaguac

SEQ ID NO: 41651 - RNA, 22 nt, Artificial Sequence
  RPE65 RNA guide
caguugagagaaggaagauaca

SEQ ID NO: 41652 - RNA, 22 nt, Artificial Sequence
  RPE65 RNA guide
cauaaguuugaguccucagacu

SEQ ID NO: 41653 - RNA, 22 nt, Artificial Sequence
  RPE65 RNA guide
cauaaugcccccucaugugucu

SEQ ID NO: 41654 - RNA, 22 nt, Artificial Sequence
  RPE65 RNA guide
cauacaguaccaugugcaagac

SEQ ID NO: 41655 - RNA, 22 nt, Artificial Sequence
  RPE65 RNA guide
cauacagugcucugguuaguua

SEQ ID NO: 41656 - RNA, 22 nt, Artificial Sequence
  RPE65 RNA guide
cauaguaccauacgaaauugac

SEQ ID NO: 41657 - RNA, 22 nt, Artificial Sequence
  RPE65 RNA guide
cauauaguugguauuuacauag

SEQ ID NO: 41658 - RNA, 22 nt, Artificial Sequence
  RPE65 RNA guide
cauaugcagauugaccugaaac

SEQ ID NO: 41659 - RNA, 22 nt, Artificial Sequence
  RPE65 RNA guide
caucaaauaaagagaugucaca

SEQ ID NO: 41660 - RNA, 22 nt, Artificial Sequence
  RPE65 RNA guide
caucacuaccccuugaacucuc

SEQ ID NO: 41661 - RNA, 22 nt, Artificial Sequence
  RPE65 RNA guide
cauccuaagugcacuucucuuu

SEQ ID NO: 41662 - RNA, 22 nt, Artificial Sequence
  RPE65 RNA guide
caucucucuggauucuacccuc

SEQ ID NO: 41663 - RNA, 22 nt, Artificial Sequence
  RPE65 RNA guide
caugaaggugggaacucaaggu

SEQ ID NO: 41664 - RNA, 22 nt, Artificial Sequence
  RPE65 RNA guide
caugagggggcauuauguucug

SEQ ID NO: 41665 - RNA, 22 nt, Artificial Sequence
  RPE65 RNA guide
caugcagaacauaaugcccccu

SEQ ID NO: 41666 - RNA, 22 nt, Artificial Sequence
  RPE65 RNA guide
caugguacuguaugaguuugga

SEQ ID NO: 41667 - RNA, 22 nt, Artificial Sequence
  RPE65 RNA guide
caugugcaagacauauaguugg

SEQ ID NO: 41668 - RNA, 22 nt, Artificial Sequence
  RPE65 RNA guide
caugugucugaaucuggaguua

SEQ ID NO: 41669 - RNA, 22 nt, Artificial Sequence
  RPE65 RNA guide
cauuauaccuuugucccuaggu

SEQ ID NO: 41670 - RNA, 22 nt, Artificial Sequence
  RPE65 RNA guide
cauuauguucugcaugaaggug

SEQ ID NO: 41671 - RNA, 22 nt, Artificial Sequence
  RPE65 RNA guide
ccaaaaaugucaauuucguaug

SEQ ID NO: 41672 - RNA, 22 nt, Artificial Sequence
  RPE65 RNA guide
ccaaacucauacaguaccaugu

SEQ ID NO: 41673 - RNA, 22 nt, Artificial Sequence
  RPE65 RNA guide
ccaacuauaugucuugcacaug

SEQ ID NO: 41674 - RNA, 22 nt, Artificial Sequence
  RPE65 RNA guide
ccaccuucaugcagaacauaau

SEQ ID NO: 41675 - RNA, 22 nt, Artificial Sequence
  RPE65 RNA guide
ccagagagaugggaagaaagag

SEQ ID NO: 41676 - RNA, 22 nt, Artificial Sequence
  RPE65 RNA guide
ccagagcacuguaugguauaca

SEQ ID NO: 41677 - RNA, 22 nt, Artificial Sequence
  RPE65 RNA guide
ccagauucagacacaugagggg

SEQ ID NO: 41678 - RNA, 22 nt, Artificial Sequence
  RPE65 RNA guide
ccaguugagagaaggaagauac

SEQ ID NO: 41679 - RNA, 22 nt, Artificial Sequence
  RPE65 RNA guide
ccauaaguuugaguccucagac

SEQ ID NO: 41680 - RNA, 22 nt, Artificial Sequence
  RPE65 RNA guide
ccauacagugcucugguuaguu

SEQ ID NO: 41681 - RNA, 22 nt, Artificial Sequence
  RPE65 RNA guide
ccauacgaaauugacauuuuug

SEQ ID NO: 41682 - RNA, 22 nt, Artificial Sequence
  RPE65 RNA guide
ccaucucucuggauucuacccu

SEQ ID NO: 41683 - RNA, 22 nt, Artificial Sequence
  RPE65 RNA guide
ccaugugcaagacauauaguug

SEQ ID NO: 41684 - RNA, 22 nt, Artificial Sequence
  RPE65 RNA guide
cccaccuucaugcagaacauaa

SEQ ID NO: 41685 - RNA, 22 nt, Artificial Sequence
  RPE65 RNA guide
cccaucucucuggauucuaccc

SEQ ID NO: 41686 - RNA, 22 nt, Artificial Sequence
  RPE65 RNA guide
cccccucaugugucugaaucug

SEQ ID NO: 41687 - RNA, 22 nt, Artificial Sequence
  RPE65 RNA guide
ccccucaugugucugaaucugg

SEQ ID NO: 41688 - RNA, 22 nt, Artificial Sequence
  RPE65 RNA guide
ccccuugaacucucauccuaag

SEQ ID NO: 41689 - RNA, 22 nt, Artificial Sequence
  RPE65 RNA guide
cccuaggucugaggucaucacu

SEQ ID NO: 41690 - RNA, 22 nt, Artificial Sequence
  RPE65 RNA guide
cccucaugugucugaaucugga

SEQ ID NO: 41691 - RNA, 22 nt, Artificial Sequence
  RPE65 RNA guide
cccucuuucaccuugaguuccc

SEQ ID NO: 41692 - RNA, 22 nt, Artificial Sequence
  RPE65 RNA guide
cccuugaacucucauccuaagu

SEQ ID NO: 41693 - RNA, 22 nt, Artificial Sequence
  RPE65 RNA guide
cccuuucaguuccaaacucaua

SEQ ID NO: 41694 - RNA, 22 nt, Artificial Sequence
  RPE65 RNA guide
ccuaagugcacuucucuuucuu

SEQ ID NO: 41695 - RNA, 22 nt, Artificial Sequence
  RPE65 RNA guide
ccuagggacaaagguauaaugu

SEQ ID NO: 41696 - RNA, 22 nt, Artificial Sequence
  RPE65 RNA guide
ccuaggucugaggucaucacua

SEQ ID NO: 41697 - RNA, 22 nt, Artificial Sequence
  RPE65 RNA guide
ccucagaccuagggacaaaggu

SEQ ID NO: 41698 - RNA, 22 nt, Artificial Sequence
  RPE65 RNA guide
ccucagacuucuuuauacucuu

SEQ ID NO: 41699 - RNA, 22 nt, Artificial Sequence
  RPE65 RNA guide
ccucaugugucugaaucuggag

SEQ ID NO: 41700 - RNA, 22 nt, Artificial Sequence
  RPE65 RNA guide
ccuccaguugagagaaggaaga

SEQ ID NO: 41701 - RNA, 22 nt, Artificial Sequence
  RPE65 RNA guide
ccucuuucaccuugaguuccca

SEQ ID NO: 41702 - RNA, 22 nt, Artificial Sequence
  RPE65 RNA guide
ccugaaaccauaaguuugaguc

SEQ ID NO: 41703 - RNA, 22 nt, Artificial Sequence
  RPE65 RNA guide
ccugugacaucucuuuauuuga

SEQ ID NO: 41704 - RNA, 22 nt, Artificial Sequence
  RPE65 RNA guide
ccuucaugcagaacauaaugcc

SEQ ID NO: 41705 - RNA, 22 nt, Artificial Sequence
  RPE65 RNA guide
ccuucucucaacuggaggacau

SEQ ID NO: 41706 - RNA, 22 nt, Artificial Sequence
  RPE65 RNA guide
ccuugaacucucauccuaagug

SEQ ID NO: 41707 - RNA, 22 nt, Artificial Sequence
  RPE65 RNA guide
ccuugaguucccaccuucaugc

SEQ ID NO: 41708 - RNA, 22 nt, Artificial Sequence
  RPE65 RNA guide
ccuuucaguuccaaacucauac

SEQ ID NO: 41709 - RNA, 22 nt, Artificial Sequence
  RPE65 RNA guide
ccuuugucccuaggucugaggu

SEQ ID NO: 41710 - RNA, 22 nt, Artificial Sequence
  RPE65 RNA guide
cgaaauugacauuuuuggaaau

SEQ ID NO: 41711 - RNA, 22 nt, Artificial Sequence
  RPE65 RNA guide
cggaaguaaagugaauguccuc

SEQ ID NO: 41712 - RNA, 22 nt, Artificial Sequence
  RPE65 RNA guide
cguaugguacuauguaaauacc

SEQ ID NO: 41713 - RNA, 22 nt, Artificial Sequence
  RPE65 RNA guide
cuaaaagaaaaguaacuaacca

SEQ ID NO: 41714 - RNA, 22 nt, Artificial Sequence
  RPE65 RNA guide
cuaaccagagcacuguauggua

SEQ ID NO: 41715 - RNA, 22 nt, Artificial Sequence
  RPE65 RNA guide
cuaagugcacuucucuuucuuc

SEQ ID NO: 41716 - RNA, 22 nt, Artificial Sequence
  RPE65 RNA guide
cuaccccuugaacucucauccu

SEQ ID NO: 41717 - RNA, 22 nt, Artificial Sequence
  RPE65 RNA guide
cuacccucuuucaccuugaguu

SEQ ID NO: 41718 - RNA, 22 nt, Artificial Sequence
  RPE65 RNA guide
cuacggaaguaaagugaauguc

SEQ ID NO: 41719 - RNA, 22 nt, Artificial Sequence
  RPE65 RNA guide
cuagaugaagcuugaagucccu

SEQ ID NO: 41720 - RNA, 22 nt, Artificial Sequence
  RPE65 RNA guide
cuagggacaaagguauaaugua

SEQ ID NO: 41721 - RNA, 22 nt, Artificial Sequence
  RPE65 RNA guide
cuaggucugaggucaucacuac

SEQ ID NO: 41722 - RNA, 22 nt, Artificial Sequence
  RPE65 RNA guide
cuauacuagaugaagcuugaag

SEQ ID NO: 41723 - RNA, 22 nt, Artificial Sequence
  RPE65 RNA guide
cuauaugucuugcacaugguac

SEQ ID NO: 41724 - RNA, 22 nt, Artificial Sequence
  RPE65 RNA guide
cucaaacuuaugguuucagguc

SEQ ID NO: 41725 - RNA, 22 nt, Artificial Sequence
  RPE65 RNA guide
cucaacuggaggacauucacuu

SEQ ID NO: 41726 - RNA, 22 nt, Artificial Sequence
  RPE65 RNA guide
cucaaggugaaagaggguagaa

SEQ ID NO: 41727 - RNA, 22 nt, Artificial Sequence
  RPE65 RNA guide
cucagaccuagggacaaaggua

SEQ ID NO: 41728 - RNA, 22 nt, Artificial Sequence
  RPE65 RNA guide
cucauacaguaccaugugcaag

SEQ ID NO: 41729 - RNA, 22 nt, Artificial Sequence
  RPE65 RNA guide
cucauccuaagugcacuucucu

SEQ ID NO: 41730 - RNA, 22 nt, Artificial Sequence
  RPE65 RNA guide
cucaugugucugaaucuggagu

SEQ ID NO: 41731 - RNA, 22 nt, Artificial Sequence
  RPE65 RNA guide
cuccagauucagacacaugagg

SEQ ID NO: 41732 - RNA, 22 nt, Artificial Sequence
  RPE65 RNA guide
cuccaguugagagaaggaagau

SEQ ID NO: 41733 - RNA, 22 nt, Artificial Sequence
  RPE65 RNA guide
cucucaacuggaggacauucac

SEQ ID NO: 41734 - RNA, 22 nt, Artificial Sequence
  RPE65 RNA guide
cucucauccuaagugcacuucu

SEQ ID NO: 41735 - RNA, 22 nt, Artificial Sequence
  RPE65 RNA guide
cucucuggauucuacccucuuu

SEQ ID NO: 41736 - RNA, 22 nt, Artificial Sequence
  RPE65 RNA guide
cucuggauucuacccucuuuca

SEQ ID NO: 41737 - RNA, 22 nt, Artificial Sequence
  RPE65 RNA guide
cucugguuaguuacuuuucuuu

SEQ ID NO: 41738 - RNA, 22 nt, Artificial Sequence
  RPE65 RNA guide
cucuuuauuugauguauaccau

SEQ ID NO: 41739 - RNA, 22 nt, Artificial Sequence
  RPE65 RNA guide
cucuuucaccuugaguucccac

SEQ ID NO: 41740 - RNA, 22 nt, Artificial Sequence
  RPE65 RNA guide
cucuuucuucccaucucucugg

SEQ ID NO: 41741 - RNA, 22 nt, Artificial Sequence
  RPE65 RNA guide
cugaaaccauaaguuugagucc

SEQ ID NO: 41742 - RNA, 22 nt, Artificial Sequence
  RPE65 RNA guide
cugaaagggacuucaagcuuca

SEQ ID NO: 41743 - RNA, 22 nt, Artificial Sequence
  RPE65 RNA guide
cugaaucuggaguuaccuguga

SEQ ID NO: 41744 - RNA, 22 nt, Artificial Sequence
  RPE65 RNA guide
cugaggacucaaacuuaugguu

SEQ ID NO: 41745 - RNA, 22 nt, Artificial Sequence
  RPE65 RNA guide
cugaggucaucacuaccccuug

SEQ ID NO: 41746 - RNA, 22 nt, Artificial Sequence
  RPE65 RNA guide
cugauuuccaaaaaugucaauu

SEQ ID NO: 41747 - RNA, 22 nt, Artificial Sequence
  RPE65 RNA guide
cugcauaugcuaaaagaaaagu

SEQ ID NO: 41748 - RNA, 22 nt, Artificial Sequence
  RPE65 RNA guide
cugcaugaaggugggaacucaa

SEQ ID NO: 41749 - RNA, 22 nt, Artificial Sequence
  RPE65 RNA guide
cuggaggacauucacuuuacuu

SEQ ID NO: 41750 - RNA, 22 nt, Artificial Sequence
  RPE65 RNA guide
cuggaguuaccugugacaucuc

SEQ ID NO: 41751 - RNA, 22 nt, Artificial Sequence
  RPE65 RNA guide
cuggauucuacccucuuucacc

SEQ ID NO: 41752 - RNA, 22 nt, Artificial Sequence
  RPE65 RNA guide
cugguuaguuacuuuucuuuua

SEQ ID NO: 41753 - RNA, 22 nt, Artificial Sequence
  RPE65 RNA guide
cuguaugaguuuggaacugaaa

SEQ ID NO: 41754 - RNA, 22 nt, Artificial Sequence
  RPE65 RNA guide
cuguaugguauacaucaaauaa

SEQ ID NO: 41755 - RNA, 22 nt, Artificial Sequence
  RPE65 RNA guide
cugugacaucucuuuauuugau

SEQ ID NO: 41756 - RNA, 22 nt, Artificial Sequence
  RPE65 RNA guide
cuuaggaugagaguucaagggg

SEQ ID NO: 41757 - RNA, 22 nt, Artificial Sequence
  RPE65 RNA guide
cuuaugguuucaggucaaucug

SEQ ID NO: 41758 - RNA, 22 nt, Artificial Sequence
  RPE65 RNA guide
cuucaagcuucaucuaguauag

SEQ ID NO: 41759 - RNA, 22 nt, Artificial Sequence
  RPE65 RNA guide
cuucaugcagaacauaaugccc

SEQ ID NO: 41760 - RNA, 22 nt, Artificial Sequence
  RPE65 RNA guide
cuucccaucucucuggauucua

SEQ ID NO: 41761 - RNA, 22 nt, Artificial Sequence
  RPE65 RNA guide
cuuccuucucucaacuggagga

SEQ ID NO: 41762 - RNA, 22 nt, Artificial Sequence
  RPE65 RNA guide
cuucucucaacuggaggacauu

SEQ ID NO: 41763 - RNA, 22 nt, Artificial Sequence
  RPE65 RNA guide
cuucucuuucuucccaucucuc

SEQ ID NO: 41764 - RNA, 22 nt, Artificial Sequence
  RPE65 RNA guide
cuugaacucucauccuaagugc

SEQ ID NO: 41765 - RNA, 22 nt, Artificial Sequence
  RPE65 RNA guide
cuugaagucccuuucaguucca

SEQ ID NO: 41766 - RNA, 22 nt, Artificial Sequence
  RPE65 RNA guide
cuugaguucccaccuucaugca

SEQ ID NO: 41767 - RNA, 22 nt, Artificial Sequence
  RPE65 RNA guide
cuugcacaugguacuguaugag

SEQ ID NO: 41768 - RNA, 22 nt, Artificial Sequence
  RPE65 RNA guide
cuuuauuugauguauaccauac

SEQ ID NO: 41769 - RNA, 22 nt, Artificial Sequence
  RPE65 RNA guide
cuuucaccuugaguucccaccu

SEQ ID NO: 41770 - RNA, 22 nt, Artificial Sequence
  RPE65 RNA guide
cuuucaguuccaaacucauaca

SEQ ID NO: 41771 - RNA, 22 nt, Artificial Sequence
  RPE65 RNA guide
cuuucuauacuagaugaagcuu

SEQ ID NO: 41772 - RNA, 22 nt, Artificial Sequence
  RPE65 RNA guide
cuuucuucccaucucucuggau

SEQ ID NO: 41773 - RNA, 22 nt, Artificial Sequence
  RPE65 RNA guide
cuuugucccuaggucugagguc

SEQ ID NO: 41774 - RNA, 22 nt, Artificial Sequence
  RPE65 RNA guide
cuuuuagcauaugcagauugac

SEQ ID NO: 41775 - RNA, 22 nt, Artificial Sequence
  RPE65 RNA guide
cuuuucuuuuagcauaugcaga

SEQ ID NO: 41776 - RNA, 22 nt, Artificial Sequence
  RPE65 RNA guide
gaaaaguaacuaaccagagcac

SEQ ID NO: 41777 - RNA, 22 nt, Artificial Sequence
  RPE65 RNA guide
gaaaccauaaguuugaguccuc

SEQ ID NO: 41778 - RNA, 22 nt, Artificial Sequence
  RPE65 RNA guide
gaaagagaagugcacuuaggau

SEQ ID NO: 41779 - RNA, 22 nt, Artificial Sequence
  RPE65 RNA guide
gaaagaggguagaauccagaga

SEQ ID NO: 41780 - RNA, 22 nt, Artificial Sequence
  RPE65 RNA guide
gaaagggacuucaagcuucauc

SEQ ID NO: 41781 - RNA, 22 nt, Artificial Sequence
  RPE65 RNA guide
gaaauugacauuuuuggaaauc

SEQ ID NO: 41782 - RNA, 22 nt, Artificial Sequence
  RPE65 RNA guide
gaacauaaugcccccucaugug

SEQ ID NO: 41783 - RNA, 22 nt, Artificial Sequence
  RPE65 RNA guide
gaacucaaggugaaagagggua

SEQ ID NO: 41784 - RNA, 22 nt, Artificial Sequence
  RPE65 RNA guide
gaacucucauccuaagugcacu

SEQ ID NO: 41785 - RNA, 22 nt, Artificial Sequence
  RPE65 RNA guide
gaacugaaagggacuucaagcu

SEQ ID NO: 41786 - RNA, 22 nt, Artificial Sequence
  RPE65 RNA guide
gaagaaagagaagugcacuuag

SEQ ID NO: 41787 - RNA, 22 nt, Artificial Sequence
  RPE65 RNA guide
gaagauacauuauaccuuuguc

SEQ ID NO: 41788 - RNA, 22 nt, Artificial Sequence
  RPE65 RNA guide
gaagcuugaagucccuuucagu

SEQ ID NO: 41789 - RNA, 22 nt, Artificial Sequence
  RPE65 RNA guide
gaaggaagauacauuauaccuu

SEQ ID NO: 41790 - RNA, 22 nt, Artificial Sequence
  RPE65 RNA guide
gaaggugggaacucaaggugaa

SEQ ID NO: 41791 - RNA, 22 nt, Artificial Sequence
  RPE65 RNA guide
gaaguaaagugaauguccucca

SEQ ID NO: 41792 - RNA, 22 nt, Artificial Sequence
  RPE65 RNA guide
gaagucccuuucaguuccaaac

SEQ ID NO: 41793 - RNA, 22 nt, Artificial Sequence
  RPE65 RNA guide
gaagucugaggacucaaacuua

SEQ ID NO: 41794 - RNA, 22 nt, Artificial Sequence
  RPE65 RNA guide
gaagugcacuuaggaugagagu

SEQ ID NO: 41795 - RNA, 22 nt, Artificial Sequence
  RPE65 RNA guide
gaauccagagagaugggaagaa

SEQ ID NO: 41796 - RNA, 22 nt, Artificial Sequence
  RPE65 RNA guide
gaaucuggaguuaccugugaca

SEQ ID NO: 41797 - RNA, 22 nt, Artificial Sequence
  RPE65 RNA guide
gaauguccuccaguugagagaa

SEQ ID NO: 41798 - RNA, 22 nt, Artificial Sequence
  RPE65 RNA guide
gacaaagguauaauguaucuuc

SEQ ID NO: 41799 - RNA, 22 nt, Artificial Sequence
  RPE65 RNA guide
gacacaugagggggcauuaugu

SEQ ID NO: 41800 - RNA, 22 nt, Artificial Sequence
  RPE65 RNA guide
gacaucucuuuauuugauguau

SEQ ID NO: 41801 - RNA, 22 nt, Artificial Sequence
  RPE65 RNA guide
gaccuagggacaaagguauaau

SEQ ID NO: 41802 - RNA, 22 nt, Artificial Sequence
  RPE65 RNA guide
gaccucagaccuagggacaaag

SEQ ID NO: 41803 - RNA, 22 nt, Artificial Sequence
  RPE65 RNA guide
gaccugaaaccauaaguuugag

SEQ ID NO: 41804 - RNA, 22 nt, Artificial Sequence
  RPE65 RNA guide
gacucaaacuuaugguuucagg

SEQ ID NO: 41805 - RNA, 22 nt, Artificial Sequence
  RPE65 RNA guide
gacuucaagcuucaucuaguau

SEQ ID NO: 41806 - RNA, 22 nt, Artificial Sequence
  RPE65 RNA guide
gagaaggaagauacauuauacc

SEQ ID NO: 41807 - RNA, 22 nt, Artificial Sequence
  RPE65 RNA guide
gagaagugcacuuaggaugaga

SEQ ID NO: 41808 - RNA, 22 nt, Artificial Sequence
  RPE65 RNA guide
gagagaaggaagauacauuaua

SEQ ID NO: 41809 - RNA, 22 nt, Artificial Sequence
  RPE65 RNA guide
gagagaugggaagaaagagaag

SEQ ID NO: 41810 - RNA, 22 nt, Artificial Sequence
  RPE65 RNA guide
gagaguucaagggguagugaug

SEQ ID NO: 41811 - RNA, 22 nt, Artificial Sequence
  RPE65 RNA guide
gagaugggaagaaagagaagug

SEQ ID NO: 41812 - RNA, 22 nt, Artificial Sequence
  RPE65 RNA guide
gagaugucacagguaacuccag

SEQ ID NO: 41813 - RNA, 22 nt, Artificial Sequence
  RPE65 RNA guide
gagcacuguaugguauacauca

SEQ ID NO: 41814 - RNA, 22 nt, Artificial Sequence
  RPE65 RNA guide
gaggacucaaacuuaugguuuc

SEQ ID NO: 41815 - RNA, 22 nt, Artificial Sequence
  RPE65 RNA guide
gagggggcauuauguucugcau

SEQ ID NO: 41816 - RNA, 22 nt, Artificial Sequence
  RPE65 RNA guide
gaggguagaauccagagagaug

SEQ ID NO: 41817 - RNA, 22 nt, Artificial Sequence
  RPE65 RNA guide
gaggucaucacuaccccuugaa

SEQ ID NO: 41818 - RNA, 22 nt, Artificial Sequence
  RPE65 RNA guide
gaguauaaagaagucugaggac

SEQ ID NO: 41819 - RNA, 22 nt, Artificial Sequence
  RPE65 RNA guide
gaguccucagacuucuuuauac

SEQ ID NO: 41820 - RNA, 22 nt, Artificial Sequence
  RPE65 RNA guide
gaguuaccugugacaucucuuu

SEQ ID NO: 41821 - RNA, 22 nt, Artificial Sequence
  RPE65 RNA guide
gaguucaagggguagugaugac

SEQ ID NO: 41822 - RNA, 22 nt, Artificial Sequence
  RPE65 RNA guide
gaguucccaccuucaugcagaa

SEQ ID NO: 41823 - RNA, 22 nt, Artificial Sequence
  RPE65 RNA guide
gaguuuggaacugaaagggacu

SEQ ID NO: 41824 - RNA, 22 nt, Artificial Sequence
  RPE65 RNA guide
gauacauuauaccuuugucccu

SEQ ID NO: 41825 - RNA, 22 nt, Artificial Sequence
  RPE65 RNA guide
gaugaagcuugaagucccuuuc

SEQ ID NO: 41826 - RNA, 22 nt, Artificial Sequence
  RPE65 RNA guide
gaugaccucagaccuagggaca

SEQ ID NO: 41827 - RNA, 22 nt, Artificial Sequence
  RPE65 RNA guide
gaugagaguucaagggguagug

SEQ ID NO: 41828 - RNA, 22 nt, Artificial Sequence
  RPE65 RNA guide
gaugggaagaaagagaagugca

SEQ ID NO: 41829 - RNA, 22 nt, Artificial Sequence
  RPE65 RNA guide
gauguauaccauacagugcucu

SEQ ID NO: 41830 - RNA, 22 nt, Artificial Sequence
  RPE65 RNA guide
gaugucacagguaacuccagau

SEQ ID NO: 41831 - RNA, 22 nt, Artificial Sequence
  RPE65 RNA guide
gauucagacacaugagggggca

SEQ ID NO: 41832 - RNA, 22 nt, Artificial Sequence
  RPE65 RNA guide
gauucuacccucuuucaccuug

SEQ ID NO: 41833 - RNA, 22 nt, Artificial Sequence
  RPE65 RNA guide
gauugaccugaaaccauaaguu

SEQ ID NO: 41834 - RNA, 22 nt, Artificial Sequence
  RPE65 RNA guide
gcaagacauauaguugguauuu

SEQ ID NO: 41835 - RNA, 22 nt, Artificial Sequence
  RPE65 RNA guide
gcacaugguacuguaugaguuu

SEQ ID NO: 41836 - RNA, 22 nt, Artificial Sequence
  RPE65 RNA guide
gcacuguaugguauacaucaaa

SEQ ID NO: 41837 - RNA, 22 nt, Artificial Sequence
  RPE65 RNA guide
gcacuuaggaugagaguucaag

SEQ ID NO: 41838 - RNA, 22 nt, Artificial Sequence
  RPE65 RNA guide
gcacuucucuuucuucccaucu

SEQ ID NO: 41839 - RNA, 22 nt, Artificial Sequence
  RPE65 RNA guide
gcagaacauaaugcccccucau

SEQ ID NO: 41840 - RNA, 22 nt, Artificial Sequence
  RPE65 RNA guide
gcagauugaccugaaaccauaa

SEQ ID NO: 41841 - RNA, 22 nt, Artificial Sequence
  RPE65 RNA guide
gcauaugcagauugaccugaaa

SEQ ID NO: 41842 - RNA, 22 nt, Artificial Sequence
  RPE65 RNA guide
gcaugaaggugggaacucaagg

SEQ ID NO: 41843 - RNA, 22 nt, Artificial Sequence
  RPE65 RNA guide
gcauuauguucugcaugaaggu

SEQ ID NO: 41844 - RNA, 22 nt, Artificial Sequence
  RPE65 RNA guide
gcccccucaugugucugaaucu

SEQ ID NO: 41845 - RNA, 22 nt, Artificial Sequence
  RPE65 RNA guide
gcuaaaagaaaaguaacuaacc

SEQ ID NO: 41846 - RNA, 22 nt, Artificial Sequence
  RPE65 RNA guide
gcucugguuaguuacuuuucuu

SEQ ID NO: 41847 - RNA, 22 nt, Artificial Sequence
  RPE65 RNA guide
gcugauuuccaaaaaugucaau

SEQ ID NO: 41848 - RNA, 22 nt, Artificial Sequence
  RPE65 RNA guide
gcuugaagucccuuucaguucc

SEQ ID NO: 41849 - RNA, 22 nt, Artificial Sequence
  RPE65 RNA guide
ggaacucaaggugaaagagggu

SEQ ID NO: 41850 - RNA, 22 nt, Artificial Sequence
  RPE65 RNA guide
ggaacugaaagggacuucaagc

SEQ ID NO: 41851 - RNA, 22 nt, Artificial Sequence
  RPE65 RNA guide
ggaagaaagagaagugcacuua

SEQ ID NO: 41852 - RNA, 22 nt, Artificial Sequence
  RPE65 RNA guide
ggaagauacauuauaccuuugu

SEQ ID NO: 41853 - RNA, 22 nt, Artificial Sequence
  RPE65 RNA guide
ggaaguaaagugaauguccucc

SEQ ID NO: 41854 - RNA, 22 nt, Artificial Sequence
  RPE65 RNA guide
ggacaaagguauaauguaucuu

SEQ ID NO: 41855 - RNA, 22 nt, Artificial Sequence
  RPE65 RNA guide
ggacucaaacuuaugguuucag

SEQ ID NO: 41856 - RNA, 22 nt, Artificial Sequence
  RPE65 RNA guide
ggacuucaagcuucaucuagua

SEQ ID NO: 41857 - RNA, 22 nt, Artificial Sequence
  RPE65 RNA guide
ggaggacauucacuuuacuucc

SEQ ID NO: 41858 - RNA, 22 nt, Artificial Sequence
  RPE65 RNA guide
ggaguuaccugugacaucucuu

SEQ ID NO: 41859 - RNA, 22 nt, Artificial Sequence
  RPE65 RNA guide
ggaugagaguucaagggguagu

SEQ ID NO: 41860 - RNA, 22 nt, Artificial Sequence
  RPE65 RNA guide
ggauucuacccucuuucaccuu

SEQ ID NO: 41861 - RNA, 22 nt, Artificial Sequence
  RPE65 RNA guide
ggcauuauguucugcaugaagg

SEQ ID NO: 41862 - RNA, 22 nt, Artificial Sequence
  RPE65 RNA guide
gggaacucaaggugaaagaggg

SEQ ID NO: 41863 - RNA, 22 nt, Artificial Sequence
  RPE65 RNA guide
gggaagaaagagaagugcacuu

SEQ ID NO: 41864 - RNA, 22 nt, Artificial Sequence
  RPE65 RNA guide
gggacaaagguauaauguaucu

SEQ ID NO: 41865 - RNA, 22 nt, Artificial Sequence
  RPE65 RNA guide
gggacuucaagcuucaucuagu

SEQ ID NO: 41866 - RNA, 22 nt, Artificial Sequence
  RPE65 RNA guide
gggcauuauguucugcaugaag

SEQ ID NO: 41867 - RNA, 22 nt, Artificial Sequence
  RPE65 RNA guide
ggggcauuauguucugcaugaa

SEQ ID NO: 41868 - RNA, 22 nt, Artificial Sequence
  RPE65 RNA guide
gggggcauuauguucugcauga

SEQ ID NO: 41869 - RNA, 22 nt, Artificial Sequence
  RPE65 RNA guide
gggguagugaugaccucagacc

SEQ ID NO: 41870 - RNA, 22 nt, Artificial Sequence
  RPE65 RNA guide
ggguagaauccagagagauggg

SEQ ID NO: 41871 - RNA, 22 nt, Artificial Sequence
  RPE65 RNA guide
ggguagugaugaccucagaccu

SEQ ID NO: 41872 - RNA, 22 nt, Artificial Sequence
  RPE65 RNA guide
gguaacuccagauucagacaca

SEQ ID NO: 41873 - RNA, 22 nt, Artificial Sequence
  RPE65 RNA guide
gguacuauguaaauaccaacua

SEQ ID NO: 41874 - RNA, 22 nt, Artificial Sequence
  RPE65 RNA guide
gguacuguaugaguuuggaacu

SEQ ID NO: 41875 - RNA, 22 nt, Artificial Sequence
  RPE65 RNA guide
gguagaauccagagagauggga

SEQ ID NO: 41876 - RNA, 22 nt, Artificial Sequence
  RPE65 RNA guide
gguagugaugaccucagaccua

SEQ ID NO: 41877 - RNA, 22 nt, Artificial Sequence
  RPE65 RNA guide
gguauaauguaucuuccuucuc

SEQ ID NO: 41878 - RNA, 22 nt, Artificial Sequence
  RPE65 RNA guide
gguauacaucaaauaaagagau

SEQ ID NO: 41879 - RNA, 22 nt, Artificial Sequence
  RPE65 RNA guide
gguauuuacauaguaccauacg

SEQ ID NO: 41880 - RNA, 22 nt, Artificial Sequence
  RPE65 RNA guide
ggucaaucugcauaugcuaaaa

SEQ ID NO: 41881 - RNA, 22 nt, Artificial Sequence
  RPE65 RNA guide
ggucaucacuaccccuugaacu

SEQ ID NO: 41882 - RNA, 22 nt, Artificial Sequence
  RPE65 RNA guide
ggucugaggucaucacuacccc

SEQ ID NO: 41883 - RNA, 22 nt, Artificial Sequence
  RPE65 RNA guide
ggugaaagaggguagaauccag

SEQ ID NO: 41884 - RNA, 22 nt, Artificial Sequence
  RPE65 RNA guide
ggugggaacucaaggugaaaga

SEQ ID NO: 41885 - RNA, 22 nt, Artificial Sequence
  RPE65 RNA guide
gguuucaggucaaucugcauau

SEQ ID NO: 41886 - RNA, 22 nt, Artificial Sequence
  RPE65 RNA guide
guaaagugaauguccuccaguu

SEQ ID NO: 41887 - RNA, 22 nt, Artificial Sequence
  RPE65 RNA guide
guaaauaccaacuauaugucuu

SEQ ID NO: 41888 - RNA, 22 nt, Artificial Sequence
  RPE65 RNA guide
guaacuaaccagagcacuguau

SEQ ID NO: 41889 - RNA, 22 nt, Artificial Sequence
  RPE65 RNA guide
guaacuccagauucagacacau

SEQ ID NO: 41890 - RNA, 22 nt, Artificial Sequence
  RPE65 RNA guide
guaccauacgaaauugacauuu

SEQ ID NO: 41891 - RNA, 22 nt, Artificial Sequence
  RPE65 RNA guide
guaccaugugcaagacauauag

SEQ ID NO: 41892 - RNA, 22 nt, Artificial Sequence
  RPE65 RNA guide
guacuguaugaguuuggaacug

SEQ ID NO: 41893 - RNA, 22 nt, Artificial Sequence
  RPE65 RNA guide
guagaauccagagagaugggaa

SEQ ID NO: 41894 - RNA, 22 nt, Artificial Sequence
  RPE65 RNA guide
guagugaugaccucagaccuag

SEQ ID NO: 41895 - RNA, 22 nt, Artificial Sequence
  RPE65 RNA guide
guauaaagaagucugaggacuc

SEQ ID NO: 41896 - RNA, 22 nt, Artificial Sequence
  RPE65 RNA guide
guauaauguaucuuccuucucu

SEQ ID NO: 41897 - RNA, 22 nt, Artificial Sequence
  RPE65 RNA guide
guauacaucaaauaaagagaug

SEQ ID NO: 41898 - RNA, 22 nt, Artificial Sequence
  RPE65 RNA guide
guauaccauacagugcucuggu

SEQ ID NO: 41899 - RNA, 22 nt, Artificial Sequence
  RPE65 RNA guide
guaucuuccuucucucaacugg

SEQ ID NO: 41900 - RNA, 22 nt, Artificial Sequence
  RPE65 RNA guide
guaugaguuuggaacugaaagg

SEQ ID NO: 41901 - RNA, 22 nt, Artificial Sequence
  RPE65 RNA guide
guaugguacuauguaaauacca

SEQ ID NO: 41902 - RNA, 22 nt, Artificial Sequence
  RPE65 RNA guide
gucaaucugcauaugcuaaaag

SEQ ID NO: 41903 - RNA, 22 nt, Artificial Sequence
  RPE65 RNA guide
gucaauuucguaugguacuaug

SEQ ID NO: 41904 - RNA, 22 nt, Artificial Sequence
  RPE65 RNA guide
gucacagguaacuccagauuca

SEQ ID NO: 41905 - RNA, 22 nt, Artificial Sequence
  RPE65 RNA guide
gucaucacuaccccuugaacuc

SEQ ID NO: 41906 - RNA, 22 nt, Artificial Sequence
  RPE65 RNA guide
gucccuaggucugaggucauca

SEQ ID NO: 41907 - RNA, 22 nt, Artificial Sequence
  RPE65 RNA guide
gucccuuucaguuccaaacuca

SEQ ID NO: 41908 - RNA, 22 nt, Artificial Sequence
  RPE65 RNA guide
guccucagacuucuuuauacuc

SEQ ID NO: 41909 - RNA, 22 nt, Artificial Sequence
  RPE65 RNA guide
guccuccaguugagagaaggaa

SEQ ID NO: 41910 - RNA, 22 nt, Artificial Sequence
  RPE65 RNA guide
gucugaaucuggaguuaccugu

SEQ ID NO: 41911 - RNA, 22 nt, Artificial Sequence
  RPE65 RNA guide
gucugaggacucaaacuuaugg

SEQ ID NO: 41912 - RNA, 22 nt, Artificial Sequence
  RPE65 RNA guide
gucugaggucaucacuaccccu

SEQ ID NO: 41913 - RNA, 22 nt, Artificial Sequence
  RPE65 RNA guide
gucuugcacaugguacuguaug

SEQ ID NO: 41914 - RNA, 22 nt, Artificial Sequence
  RPE65 RNA guide
gugaaagaggguagaauccaga

SEQ ID NO: 41915 - RNA, 22 nt, Artificial Sequence
  RPE65 RNA guide
gugaauguccuccaguugagag

SEQ ID NO: 41916 - RNA, 22 nt, Artificial Sequence
  RPE65 RNA guide
gugacaucucuuuauuugaugu

SEQ ID NO: 41917 - RNA, 22 nt, Artificial Sequence
  RPE65 RNA guide
gugaugaccucagaccuaggga

SEQ ID NO: 41918 - RNA, 22 nt, Artificial Sequence
  RPE65 RNA guide
gugcaagacauauaguugguau

SEQ ID NO: 41919 - RNA, 22 nt, Artificial Sequence
  RPE65 RNA guide
gugcacuuaggaugagaguuca

SEQ ID NO: 41920 - RNA, 22 nt, Artificial Sequence
  RPE65 RNA guide
gugcacuucucuuucuucccau

SEQ ID NO: 41921 - RNA, 22 nt, Artificial Sequence
  RPE65 RNA guide
gugcucugguuaguuacuuuuc

SEQ ID NO: 41922 - RNA, 22 nt, Artificial Sequence
  RPE65 RNA guide
gugggaacucaaggugaaagag

SEQ ID NO: 41923 - RNA, 22 nt, Artificial Sequence
  RPE65 RNA guide
gugucugaaucuggaguuaccu

SEQ ID NO: 41924 - RNA, 22 nt, Artificial Sequence
  RPE65 RNA guide
guuaccugugacaucucuuuau

SEQ ID NO: 41925 - RNA, 22 nt, Artificial Sequence
  RPE65 RNA guide
guuacuuuucuuuuagcauaug

SEQ ID NO: 41926 - RNA, 22 nt, Artificial Sequence
  RPE65 RNA guide
guucaagggguagugaugaccu

SEQ ID NO: 41927 - RNA, 22 nt, Artificial Sequence
  RPE65 RNA guide
guuccaaacucauacaguacca

SEQ ID NO: 41928 - RNA, 22 nt, Artificial Sequence
  RPE65 RNA guide
guucccaccuucaugcagaaca

SEQ ID NO: 41929 - RNA, 22 nt, Artificial Sequence
  RPE65 RNA guide
guucugcaugaaggugggaacu

SEQ ID NO: 41930 - RNA, 22 nt, Artificial Sequence
  RPE65 RNA guide
guugagagaaggaagauacauu

SEQ ID NO: 41931 - RNA, 22 nt, Artificial Sequence
  RPE65 RNA guide
guugguauuuacauaguaccau

SEQ ID NO: 41932 - RNA, 22 nt, Artificial Sequence
  RPE65 RNA guide
guuucaggucaaucugcauaug

SEQ ID NO: 41933 - RNA, 22 nt, Artificial Sequence
  RPE65 RNA guide
guuugaguccucagacuucuuu

SEQ ID NO: 41934 - RNA, 22 nt, Artificial Sequence
  RPE65 RNA guide
guuuggaacugaaagggacuuc

SEQ ID NO: 41935 - RNA, 22 nt, Artificial Sequence
  RPE65 RNA guide
uaaaagaaaaguaacuaaccag

SEQ ID NO: 41936 - RNA, 22 nt, Artificial Sequence
  RPE65 RNA guide
uaaagaagucugaggacucaaa

SEQ ID NO: 41937 - RNA, 22 nt, Artificial Sequence
  RPE65 RNA guide
uaaagagaugucacagguaacu

SEQ ID NO: 41938 - RNA, 22 nt, Artificial Sequence
  RPE65 RNA guide
uaaagugaauguccuccaguug

SEQ ID NO: 41939 - RNA, 22 nt, Artificial Sequence
  RPE65 RNA guide
uaaauaccaacuauaugucuug

SEQ ID NO: 41940 - RNA, 22 nt, Artificial Sequence
  RPE65 RNA guide
uaaccagagcacuguaugguau

SEQ ID NO: 41941 - RNA, 22 nt, Artificial Sequence
  RPE65 RNA guide
uaacuaaccagagcacuguaug

SEQ ID NO: 41942 - RNA, 22 nt, Artificial Sequence
  RPE65 RNA guide
uaacuccagauucagacacaug

SEQ ID NO: 41943 - RNA, 22 nt, Artificial Sequence
  RPE65 RNA guide
uaagaguauaaagaagucugag

SEQ ID NO: 41944 - RNA, 22 nt, Artificial Sequence
  RPE65 RNA guide
uaagugcacuucucuuucuucc

SEQ ID NO: 41945 - RNA, 22 nt, Artificial Sequence
  RPE65 RNA guide
uaaguuugaguccucagacuuc

SEQ ID NO: 41946 - RNA, 22 nt, Artificial Sequence
  RPE65 RNA guide
uaauaagaguauaaagaagucu

SEQ ID NO: 41947 - RNA, 22 nt, Artificial Sequence
  RPE65 RNA guide
uaaugcccccucaugugucuga

SEQ ID NO: 41948 - RNA, 22 nt, Artificial Sequence
  RPE65 RNA guide
uaauguaucuuccuucucucaa

SEQ ID NO: 41949 - RNA, 22 nt, Artificial Sequence
  RPE65 RNA guide
uacaguaccaugugcaagacau

SEQ ID NO: 41950 - RNA, 22 nt, Artificial Sequence
  RPE65 RNA guide
uacagugcucugguuaguuacu

SEQ ID NO: 41951 - RNA, 22 nt, Artificial Sequence
  RPE65 RNA guide
uacauaguaccauacgaaauug

SEQ ID NO: 41952 - RNA, 22 nt, Artificial Sequence
  RPE65 RNA guide
uacaucaaauaaagagauguca

SEQ ID NO: 41953 - RNA, 22 nt, Artificial Sequence
  RPE65 RNA guide
uacauuauaccuuugucccuag

SEQ ID NO: 41954 - RNA, 22 nt, Artificial Sequence
  RPE65 RNA guide
uaccaacuauaugucuugcaca

SEQ ID NO: 41955 - RNA, 22 nt, Artificial Sequence
  RPE65 RNA guide
uaccauacagugcucugguuag

SEQ ID NO: 41956 - RNA, 22 nt, Artificial Sequence
  RPE65 RNA guide
uaccauacgaaauugacauuuu

SEQ ID NO: 41957 - RNA, 22 nt, Artificial Sequence
  RPE65 RNA guide
uaccaugugcaagacauauagu

SEQ ID NO: 41958 - RNA, 22 nt, Artificial Sequence
  RPE65 RNA guide
uaccccuugaacucucauccua

SEQ ID NO: 41959 - RNA, 22 nt, Artificial Sequence
  RPE65 RNA guide
uacccucuuucaccuugaguuc

SEQ ID NO: 41960 - RNA, 22 nt, Artificial Sequence
  RPE65 RNA guide
uaccugugacaucucuuuauuu

SEQ ID NO: 41961 - RNA, 22 nt, Artificial Sequence
  RPE65 RNA guide
uaccuuugucccuaggucugag

SEQ ID NO: 41962 - RNA, 22 nt, Artificial Sequence
  RPE65 RNA guide
uacggaaguaaagugaaugucc

SEQ ID NO: 41963 - RNA, 22 nt, Artificial Sequence
  RPE65 RNA guide
uacuagaugaagcuugaagucc

SEQ ID NO: 41964 - RNA, 22 nt, Artificial Sequence
  RPE65 RNA guide
uacuguaugaguuuggaacuga

SEQ ID NO: 41965 - RNA, 22 nt, Artificial Sequence
  RPE65 RNA guide
uagaauccagagagaugggaag

SEQ ID NO: 41966 - RNA, 22 nt, Artificial Sequence
  RPE65 RNA guide
uagaugaagcuugaagucccuu

SEQ ID NO: 41967 - RNA, 22 nt, Artificial Sequence
  RPE65 RNA guide
uagcauaugcagauugaccuga

SEQ ID NO: 41968 - RNA, 22 nt, Artificial Sequence
  RPE65 RNA guide
uaggaugagaguucaaggggua

SEQ ID NO: 41969 - RNA, 22 nt, Artificial Sequence
  RPE65 RNA guide
uagggacaaagguauaauguau

SEQ ID NO: 41970 - RNA, 22 nt, Artificial Sequence
  RPE65 RNA guide
uaggucugaggucaucacuacc

SEQ ID NO: 41971 - RNA, 22 nt, Artificial Sequence
  RPE65 RNA guide
uagugaugaccucagaccuagg

SEQ ID NO: 41972 - RNA, 22 nt, Artificial Sequence
  RPE65 RNA guide
uaguugguauuuacauaguacc

SEQ ID NO: 41973 - RNA, 22 nt, Artificial Sequence
  RPE65 RNA guide
uauaaagaagucugaggacuca

SEQ ID NO: 41974 - RNA, 22 nt, Artificial Sequence
  RPE65 RNA guide
uauaauguaucuuccuucucuc

SEQ ID NO: 41975 - RNA, 22 nt, Artificial Sequence
  RPE65 RNA guide
uauaccauacagugcucugguu

SEQ ID NO: 41976 - RNA, 22 nt, Artificial Sequence
  RPE65 RNA guide
uauaccuuugucccuaggucug

SEQ ID NO: 41977 - RNA, 22 nt, Artificial Sequence
  RPE65 RNA guide
uauacuagaugaagcuugaagu

SEQ ID NO: 41978 - RNA, 22 nt, Artificial Sequence
  RPE65 RNA guide
uauaugucuugcacaugguacu

SEQ ID NO: 41979 - RNA, 22 nt, Artificial Sequence
  RPE65 RNA guide
uaucuuccuucucucaacugga

SEQ ID NO: 41980 - RNA, 22 nt, Artificial Sequence
  RPE65 RNA guide
uaugaguuuggaacugaaaggg

SEQ ID NO: 41981 - RNA, 22 nt, Artificial Sequence
  RPE65 RNA guide
uaugcagauugaccugaaacca

SEQ ID NO: 41982 - RNA, 22 nt, Artificial Sequence
  RPE65 RNA guide
uaugguuucaggucaaucugca

SEQ ID NO: 41983 - RNA, 22 nt, Artificial Sequence
  RPE65 RNA guide
uaugucuugcacaugguacugu

SEQ ID NO: 41984 - RNA, 22 nt, Artificial Sequence
  RPE65 RNA guide
uauguucugcaugaagguggga

SEQ ID NO: 41985 - RNA, 22 nt, Artificial Sequence
  RPE65 RNA guide
uauuugauguauaccauacagu

SEQ ID NO: 41986 - RNA, 22 nt, Artificial Sequence
  RPE65 RNA guide
ucaaacuuaugguuucagguca

SEQ ID NO: 41987 - RNA, 22 nt, Artificial Sequence
  RPE65 RNA guide
ucaaauaaagagaugucacagg

SEQ ID NO: 41988 - RNA, 22 nt, Artificial Sequence
  RPE65 RNA guide
ucaacuggaggacauucacuuu

SEQ ID NO: 41989 - RNA, 22 nt, Artificial Sequence
  RPE65 RNA guide
ucaagggguagugaugaccuca

SEQ ID NO: 41990 - RNA, 22 nt, Artificial Sequence
  RPE65 RNA guide
ucaaggugaaagaggguagaau

SEQ ID NO: 41991 - RNA, 22 nt, Artificial Sequence
  RPE65 RNA guide
ucaaucugcauaugcuaaaaga

SEQ ID NO: 41992 - RNA, 22 nt, Artificial Sequence
  RPE65 RNA guide
ucacagguaacuccagauucag

SEQ ID NO: 41993 - RNA, 22 nt, Artificial Sequence
  RPE65 RNA guide
ucaccuugaguucccaccuuca

SEQ ID NO: 41994 - RNA, 22 nt, Artificial Sequence
  RPE65 RNA guide
ucacuaccccuugaacucucau

SEQ ID NO: 41995 - RNA, 22 nt, Artificial Sequence
  RPE65 RNA guide
ucagacacaugagggggcauua

SEQ ID NO: 41996 - RNA, 22 nt, Artificial Sequence
  RPE65 RNA guide
ucagaccuagggacaaagguau

SEQ ID NO: 41997 - RNA, 22 nt, Artificial Sequence
  RPE65 RNA guide
ucaggucaaucugcauaugcua

SEQ ID NO: 41998 - RNA, 22 nt, Artificial Sequence
  RPE65 RNA guide
ucaguuccaaacucauacagua

SEQ ID NO: 41999 - RNA, 22 nt, Artificial Sequence
  RPE65 RNA guide
ucauacaguaccaugugcaaga

SEQ ID NO: 42000 - RNA, 22 nt, Artificial Sequence
  RPE65 RNA guide
ucaucacuaccccuugaacucu

SEQ ID NO: 42001 - RNA, 22 nt, Artificial Sequence
  RPE65 RNA guide
ucauccuaagugcacuucucuu

SEQ ID NO: 42002 - RNA, 22 nt, Artificial Sequence
  RPE65 RNA guide
ucaugcagaacauaaugccccc

SEQ ID NO: 42003 - RNA, 22 nt, Artificial Sequence
  RPE65 RNA guide
ucaugugucugaaucuggaguu

SEQ ID NO: 42004 - RNA, 22 nt, Artificial Sequence
  RPE65 RNA guide
uccaaaaaugucaauuucguau

SEQ ID NO: 42005 - RNA, 22 nt, Artificial Sequence
  RPE65 RNA guide
uccaaacucauacaguaccaug

SEQ ID NO: 42006 - RNA, 22 nt, Artificial Sequence
  RPE65 RNA guide
uccagagagaugggaagaaaga

SEQ ID NO: 42007 - RNA, 22 nt, Artificial Sequence
  RPE65 RNA guide
uccagauucagacacaugaggg

SEQ ID NO: 42008 - RNA, 22 nt, Artificial Sequence
  RPE65 RNA guide
uccaguugagagaaggaagaua

SEQ ID NO: 42009 - RNA, 22 nt, Artificial Sequence
  RPE65 RNA guide
ucccaccuucaugcagaacaua

SEQ ID NO: 42010 - RNA, 22 nt, Artificial Sequence
  RPE65 RNA guide
ucccaucucucuggauucuacc

SEQ ID NO: 42011 - RNA, 22 nt, Artificial Sequence
  RPE65 RNA guide
ucccuaggucugaggucaucac

SEQ ID NO: 42012 - RNA, 22 nt, Artificial Sequence
  RPE65 RNA guide
ucccuuucaguuccaaacucau

SEQ ID NO: 42013 - RNA, 22 nt, Artificial Sequence
  RPE65 RNA guide
uccuaagugcacuucucuuucu

SEQ ID NO: 42014 - RNA, 22 nt, Artificial Sequence
  RPE65 RNA guide
uccucagacuucuuuauacucu

SEQ ID NO: 42015 - RNA, 22 nt, Artificial Sequence
  RPE65 RNA guide
uccuccaguugagagaaggaag

SEQ ID NO: 42016 - RNA, 22 nt, Artificial Sequence
  RPE65 RNA guide
uccuucucucaacuggaggaca

SEQ ID NO: 42017 - RNA, 22 nt, Artificial Sequence
  RPE65 RNA guide
ucguaugguacuauguaaauac

SEQ ID NO: 42018 - RNA, 22 nt, Artificial Sequence
  RPE65 RNA guide
ucuacccucuuucaccuugagu

SEQ ID NO: 42019 - RNA, 22 nt, Artificial Sequence
  RPE65 RNA guide
ucuauacuagaugaagcuugaa

SEQ ID NO: 42020 - RNA, 22 nt, Artificial Sequence
  RPE65 RNA guide
ucucaacuggaggacauucacu

SEQ ID NO: 42021 - RNA, 22 nt, Artificial Sequence
  RPE65 RNA guide
ucucauccuaagugcacuucuc

SEQ ID NO: 42022 - RNA, 22 nt, Artificial Sequence
  RPE65 RNA guide
ucucucaacuggaggacauuca

SEQ ID NO: 42023 - RNA, 22 nt, Artificial Sequence
  RPE65 RNA guide
ucucucuggauucuacccucuu

SEQ ID NO: 42024 - RNA, 22 nt, Artificial Sequence
  RPE65 RNA guide
ucucuggauucuacccucuuuc

SEQ ID NO: 42025 - RNA, 22 nt, Artificial Sequence
  RPE65 RNA guide
ucucuuucuucccaucucucug

SEQ ID NO: 42026 - RNA, 22 nt, Artificial Sequence
  RPE65 RNA guide
ucugaaucuggaguuaccugug

SEQ ID NO: 42027 - RNA, 22 nt, Artificial Sequence
  RPE65 RNA guide
ucugaggacucaaacuuauggu

SEQ ID NO: 42028 - RNA, 22 nt, Artificial Sequence
  RPE65 RNA guide
ucugaggucaucacuaccccuu

SEQ ID NO: 42029 - RNA, 22 nt, Artificial Sequence
  RPE65 RNA guide
ucugcauaugcuaaaagaaaag

SEQ ID NO: 42030 - RNA, 22 nt, Artificial Sequence
  RPE65 RNA guide
ucugcaugaaggugggaacuca

SEQ ID NO: 42031 - RNA, 22 nt, Artificial Sequence
  RPE65 RNA guide
ucuggaguuaccugugacaucu

SEQ ID NO: 42032 - RNA, 22 nt, Artificial Sequence
  RPE65 RNA guide
ucuggauucuacccucuuucac

SEQ ID NO: 42033 - RNA, 22 nt, Artificial Sequence
  RPE65 RNA guide
ucugguuaguuacuuuucuuuu

SEQ ID NO: 42034 - RNA, 22 nt, Artificial Sequence
  RPE65 RNA guide
ucuucccaucucucuggauucu

SEQ ID NO: 42035 - RNA, 22 nt, Artificial Sequence
  RPE65 RNA guide
ucuuccuucucucaacuggagg

SEQ ID NO: 42036 - RNA, 22 nt, Artificial Sequence
  RPE65 RNA guide
ucuugcacaugguacuguauga

SEQ ID NO: 42037 - RNA, 22 nt, Artificial Sequence
  RPE65 RNA guide
ucuuucaccuugaguucccacc

SEQ ID NO: 42038 - RNA, 22 nt, Artificial Sequence
  RPE65 RNA guide
ucuuucuucccaucucucugga

SEQ ID NO: 42039 - RNA, 22 nt, Artificial Sequence
  RPE65 RNA guide
ucuuuuagcauaugcagauuga

SEQ ID NO: 42040 - RNA, 22 nt, Artificial Sequence
  RPE65 RNA guide
ugaaaccauaaguuugaguccu

SEQ ID NO: 42041 - RNA, 22 nt, Artificial Sequence
  RPE65 RNA guide
ugaaagaggguagaauccagag

SEQ ID NO: 42042 - RNA, 22 nt, Artificial Sequence
  RPE65 RNA guide
ugaaagggacuucaagcuucau

SEQ ID NO: 42043 - RNA, 22 nt, Artificial Sequence
  RPE65 RNA guide
ugaacucucauccuaagugcac

SEQ ID NO: 42044 - RNA, 22 nt, Artificial Sequence
  RPE65 RNA guide
ugaagcuugaagucccuuucag

SEQ ID NO: 42045 - RNA, 22 nt, Artificial Sequence
  RPE65 RNA guide
ugaaggugggaacucaagguga

SEQ ID NO: 42046 - RNA, 22 nt, Artificial Sequence
  RPE65 RNA guide
ugaagucccuuucaguuccaaa

SEQ ID NO: 42047 - RNA, 22 nt, Artificial Sequence
  RPE65 RNA guide
ugaaucuggaguuaccugugac

SEQ ID NO: 42048 - RNA, 22 nt, Artificial Sequence
  RPE65 RNA guide
ugaauguccuccaguugagaga

SEQ ID NO: 42049 - RNA, 22 nt, Artificial Sequence
  RPE65 RNA guide
ugacaucucuuuauuugaugua

SEQ ID NO: 42050 - RNA, 22 nt, Artificial Sequence
  RPE65 RNA guide
ugaccucagaccuagggacaaa

SEQ ID NO: 42051 - RNA, 22 nt, Artificial Sequence
  RPE65 RNA guide
ugaccugaaaccauaaguuuga

SEQ ID NO: 42052 - RNA, 22 nt, Artificial Sequence
  RPE65 RNA guide
ugagagaaggaagauacauuau

SEQ ID NO: 42053 - RNA, 22 nt, Artificial Sequence
  RPE65 RNA guide
ugagaguucaagggguagugau

SEQ ID NO: 42054 - RNA, 22 nt, Artificial Sequence
  RPE65 RNA guide
ugaggacucaaacuuaugguuu

SEQ ID NO: 42055 - RNA, 22 nt, Artificial Sequence
  RPE65 RNA guide
ugagggggcauuauguucugca

SEQ ID NO: 42056 - RNA, 22 nt, Artificial Sequence
  RPE65 RNA guide
ugaggucaucacuaccccuuga

SEQ ID NO: 42057 - RNA, 22 nt, Artificial Sequence
  RPE65 RNA guide
ugaguccucagacuucuuuaua

SEQ ID NO: 42058 - RNA, 22 nt, Artificial Sequence
  RPE65 RNA guide
ugaguucccaccuucaugcaga

SEQ ID NO: 42059 - RNA, 22 nt, Artificial Sequence
  RPE65 RNA guide
ugaguuuggaacugaaagggac

SEQ ID NO: 42060 - RNA, 22 nt, Artificial Sequence
  RPE65 RNA guide
ugaugaccucagaccuagggac

SEQ ID NO: 42061 - RNA, 22 nt, Artificial Sequence
  RPE65 RNA guide
ugauguauaccauacagugcuc

SEQ ID NO: 42062 - RNA, 22 nt, Artificial Sequence
  RPE65 RNA guide
ugcaagacauauaguugguauu

SEQ ID NO: 42063 - RNA, 22 nt, Artificial Sequence
  RPE65 RNA guide
ugcacaugguacuguaugaguu

SEQ ID NO: 42064 - RNA, 22 nt, Artificial Sequence
  RPE65 RNA guide
ugcacuuaggaugagaguucaa

SEQ ID NO: 42065 - RNA, 22 nt, Artificial Sequence
  RPE65 RNA guide
ugcacuucucuuucuucccauc

SEQ ID NO: 42066 - RNA, 22 nt, Artificial Sequence
  RPE65 RNA guide
ugcagaacauaaugcccccuca

SEQ ID NO: 42067 - RNA, 22 nt, Artificial Sequence
  RPE65 RNA guide
ugcagauugaccugaaaccaua

SEQ ID NO: 42068 - RNA, 22 nt, Artificial Sequence
  RPE65 RNA guide
ugcaugaaggugggaacucaag

SEQ ID NO: 42069 - RNA, 22 nt, Artificial Sequence
  RPE65 RNA guide
ugcccccucaugugucugaauc

SEQ ID NO: 42070 - RNA, 22 nt, Artificial Sequence
  RPE65 RNA guide
ugcuaaaagaaaaguaacuaac

SEQ ID NO: 42071 - RNA, 22 nt, Artificial Sequence
  RPE65 RNA guide
ugcucugguuaguuacuuuucu

SEQ ID NO: 42072 - RNA, 22 nt, Artificial Sequence
  RPE65 RNA guide
ugcugauuuccaaaaaugucaa

SEQ ID NO: 42073 - RNA, 22 nt, Artificial Sequence
  RPE65 RNA guide
uggaacugaaagggacuucaag

SEQ ID NO: 42074 - RNA, 22 nt, Artificial Sequence
  RPE65 RNA guide
uggaggacauucacuuuacuuc

SEQ ID NO: 42075 - RNA, 22 nt, Artificial Sequence
  RPE65 RNA guide
uggaguuaccugugacaucucu

SEQ ID NO: 42076 - RNA, 22 nt, Artificial Sequence
  RPE65 RNA guide
uggauucuacccucuuucaccu

SEQ ID NO: 42077 - RNA, 22 nt, Artificial Sequence
  RPE65 RNA guide
ugggaacucaaggugaaagagg

SEQ ID NO: 42078 - RNA, 22 nt, Artificial Sequence
  RPE65 RNA guide
ugggaagaaagagaagugcacu

SEQ ID NO: 42079 - RNA, 22 nt, Artificial Sequence
  RPE65 RNA guide
ugguacuguaugaguuuggaac

SEQ ID NO: 42080 - RNA, 22 nt, Artificial Sequence
  RPE65 RNA guide
ugguauacaucaaauaaagaga

SEQ ID NO: 42081 - RNA, 22 nt, Artificial Sequence
  RPE65 RNA guide
ugguauuuacauaguaccauac

SEQ ID NO: 42082 - RNA, 22 nt, Artificial Sequence
  RPE65 RNA guide
ugguuucaggucaaucugcaua

SEQ ID NO: 42083 - RNA, 22 nt, Artificial Sequence
  RPE65 RNA guide
uguaaauaccaacuauaugucu

SEQ ID NO: 42084 - RNA, 22 nt, Artificial Sequence
  RPE65 RNA guide
uguauaccauacagugcucugg

SEQ ID NO: 42085 - RNA, 22 nt, Artificial Sequence
  RPE65 RNA guide
uguaucuuccuucucucaacug

SEQ ID NO: 42086 - RNA, 22 nt, Artificial Sequence
  RPE65 RNA guide
uguaugaguuuggaacugaaag

SEQ ID NO: 42087 - RNA, 22 nt, Artificial Sequence
  RPE65 RNA guide
ugucaauuucguaugguacuau

SEQ ID NO: 42088 - RNA, 22 nt, Artificial Sequence
  RPE65 RNA guide
ugucacagguaacuccagauuc

SEQ ID NO: 42089 - RNA, 22 nt, Artificial Sequence
  RPE65 RNA guide
ugucccuaggucugaggucauc

SEQ ID NO: 42090 - RNA, 22 nt, Artificial Sequence
  RPE65 RNA guide
uguccuccaguugagagaagga

SEQ ID NO: 42091 - RNA, 22 nt, Artificial Sequence
  RPE65 RNA guide
ugucugaaucuggaguuaccug

SEQ ID NO: 42092 - RNA, 22 nt, Artificial Sequence
  RPE65 RNA guide
ugucuugcacaugguacuguau

SEQ ID NO: 42093 - RNA, 22 nt, Artificial Sequence
  RPE65 RNA guide
ugugcaagacauauaguuggua

SEQ ID NO: 42094 - RNA, 22 nt, Artificial Sequence
  RPE65 RNA guide
ugugucugaaucuggaguuacc

SEQ ID NO: 42095 - RNA, 22 nt, Artificial Sequence
  RPE65 RNA guide
uguucugcaugaaggugggaac

SEQ ID NO: 42096 - RNA, 22 nt, Artificial Sequence
  RPE65 RNA guide
uuacauaguaccauacgaaauu

SEQ ID NO: 42097 - RNA, 22 nt, Artificial Sequence
  RPE65 RNA guide
uuaccugugacaucucuuuauu

SEQ ID NO: 42098 - RNA, 22 nt, Artificial Sequence
  RPE65 RNA guide
uuagcauaugcagauugaccug

SEQ ID NO: 42099 - RNA, 22 nt, Artificial Sequence
  RPE65 RNA guide
uuaggaugagaguucaaggggu

SEQ ID NO: 42100 - RNA, 22 nt, Artificial Sequence
  RPE65 RNA guide
uuauaccuuugucccuaggucu

SEQ ID NO: 42101 - RNA, 22 nt, Artificial Sequence
  RPE65 RNA guide
uuaugguuucaggucaaucugc

SEQ ID NO: 42102 - RNA, 22 nt, Artificial Sequence
  RPE65 RNA guide
uuauguucugcaugaagguggg

SEQ ID NO: 42103 - RNA, 22 nt, Artificial Sequence
  RPE65 RNA guide
uuauuugauguauaccauacag

SEQ ID NO: 42104 - RNA, 22 nt, Artificial Sequence
  RPE65 RNA guide
uucaagcuucaucuaguauaga

SEQ ID NO: 42105 - RNA, 22 nt, Artificial Sequence
  RPE65 RNA guide
uucaagggguagugaugaccuc

SEQ ID NO: 42106 - RNA, 22 nt, Artificial Sequence
  RPE65 RNA guide
uucaccuugaguucccaccuuc

SEQ ID NO: 42107 - RNA, 22 nt, Artificial Sequence
  RPE65 RNA guide
uucagacacaugagggggcauu

SEQ ID NO: 42108 - RNA, 22 nt, Artificial Sequence
  RPE65 RNA guide
uucaggucaaucugcauaugcu

SEQ ID NO: 42109 - RNA, 22 nt, Artificial Sequence
  RPE65 RNA guide
uucaguuccaaacucauacagu

SEQ ID NO: 42110 - RNA, 22 nt, Artificial Sequence
  RPE65 RNA guide
uucaugcagaacauaaugcccc

SEQ ID NO: 42111 - RNA, 22 nt, Artificial Sequence
  RPE65 RNA guide
uuccaaaaaugucaauuucgua

SEQ ID NO: 42112 - RNA, 22 nt, Artificial Sequence
  RPE65 RNA guide
uuccaaacucauacaguaccau

SEQ ID NO: 42113 - RNA, 22 nt, Artificial Sequence
  RPE65 RNA guide
uucccaccuucaugcagaacau

SEQ ID NO: 42114 - RNA, 22 nt, Artificial Sequence
  RPE65 RNA guide
uucccaucucucuggauucuac

SEQ ID NO: 42115 - RNA, 22 nt, Artificial Sequence
  RPE65 RNA guide
uuccuucucucaacuggaggac

SEQ ID NO: 42116 - RNA, 22 nt, Artificial Sequence
  RPE65 RNA guide
uucguaugguacuauguaaaua

SEQ ID NO: 42117 - RNA, 22 nt, Artificial Sequence
  RPE65 RNA guide
uucuacccucuuucaccuugag

SEQ ID NO: 42118 - RNA, 22 nt, Artificial Sequence
  RPE65 RNA guide
uucuauacuagaugaagcuuga

SEQ ID NO: 42119 - RNA, 22 nt, Artificial Sequence
  RPE65 RNA guide
uucucucaacuggaggacauuc

SEQ ID NO: 42120 - RNA, 22 nt, Artificial Sequence
  RPE65 RNA guide
uucucuuucuucccaucucucu

SEQ ID NO: 42121 - RNA, 22 nt, Artificial Sequence
  RPE65 RNA guide
uucugcaugaaggugggaacuc

SEQ ID NO: 42122 - RNA, 22 nt, Artificial Sequence
  RPE65 RNA guide
uucuucccaucucucuggauuc

SEQ ID NO: 42123 - RNA, 22 nt, Artificial Sequence
  RPE65 RNA guide
uucuuuuagcauaugcagauug

SEQ ID NO: 42124 - RNA, 22 nt, Artificial Sequence
  RPE65 RNA guide
uugaacucucauccuaagugca

SEQ ID NO: 42125 - RNA, 22 nt, Artificial Sequence
  RPE65 RNA guide
uugaagucccuuucaguuccaa

SEQ ID NO: 42126 - RNA, 22 nt, Artificial Sequence
  RPE65 RNA guide
uugaccugaaaccauaaguuug

SEQ ID NO: 42127 - RNA, 22 nt, Artificial Sequence
  RPE65 RNA guide
uugagagaaggaagauacauua

SEQ ID NO: 42128 - RNA, 22 nt, Artificial Sequence
  RPE65 RNA guide
uugaguccucagacuucuuuau

SEQ ID NO: 42129 - RNA, 22 nt, Artificial Sequence
  RPE65 RNA guide
uugaguucccaccuucaugcag

SEQ ID NO: 42130 - RNA, 22 nt, Artificial Sequence
  RPE65 RNA guide
uugauguauaccauacagugcu

SEQ ID NO: 42131 - RNA, 22 nt, Artificial Sequence
  RPE65 RNA guide
uugcacaugguacuguaugagu

SEQ ID NO: 42132 - RNA, 22 nt, Artificial Sequence
  RPE65 RNA guide
uuggaacugaaagggacuucaa

SEQ ID NO: 42133 - RNA, 22 nt, Artificial Sequence
  RPE65 RNA guide
uugguauuuacauaguaccaua

SEQ ID NO: 42134 - RNA, 22 nt, Artificial Sequence
  RPE65 RNA guide
uugucccuaggucugaggucau

SEQ ID NO: 42135 - RNA, 22 nt, Artificial Sequence
  RPE65 RNA guide
uuuacauaguaccauacgaaau

SEQ ID NO: 42136 - RNA, 22 nt, Artificial Sequence
  RPE65 RNA guide
uuuagcauaugcagauugaccu

SEQ ID NO: 42137 - RNA, 22 nt, Artificial Sequence
  RPE65 RNA guide
uuuauuugauguauaccauaca

SEQ ID NO: 42138 - RNA, 22 nt, Artificial Sequence
  RPE65 RNA guide
uuucaccuugaguucccaccuu

SEQ ID NO: 42139 - RNA, 22 nt, Artificial Sequence
  RPE65 RNA guide
uuucaggucaaucugcauaugc

SEQ ID NO: 42140 - RNA, 22 nt, Artificial Sequence
  RPE65 RNA guide
uuucaguuccaaacucauacag

SEQ ID NO: 42141 - RNA, 22 nt, Artificial Sequence
  RPE65 RNA guide
uuuccaaaaaugucaauuucgu

SEQ ID NO: 42142 - RNA, 22 nt, Artificial Sequence
  RPE65 RNA guide
uuucguaugguacuauguaaau

SEQ ID NO: 42143 - RNA, 22 nt, Artificial Sequence
  RPE65 RNA guide
uuucuauacuagaugaagcuug

SEQ ID NO: 42144 - RNA, 22 nt, Artificial Sequence
  RPE65 RNA guide
uuucuucccaucucucuggauu

SEQ ID NO: 42145 - RNA, 22 nt, Artificial Sequence
  RPE65 RNA guide
uuucuuuuagcauaugcagauu

SEQ ID NO: 42146 - RNA, 22 nt, Artificial Sequence
  RPE65 RNA guide
uuugaguccucagacuucuuua

SEQ ID NO: 42147 - RNA, 22 nt, Artificial Sequence
  RPE65 RNA guide
uuugauguauaccauacagugc

SEQ ID NO: 42148 - RNA, 22 nt, Artificial Sequence
  RPE65 RNA guide
uuuggaacugaaagggacuuca

SEQ ID NO: 42149 - RNA, 22 nt, Artificial Sequence
  RPE65 RNA guide
uuugucccuaggucugagguca

SEQ ID NO: 42150 - RNA, 22 nt, Artificial Sequence
  RPE65 RNA guide
uuuuagcauaugcagauugacc

SEQ ID NO: 42151 - RNA, 22 nt, Artificial Sequence
  RPE65 RNA guide
uuuucuuuuagcauaugcagau

SEQ ID NO: 42152 - RNA, 20 nt, Artificial Sequence
  RPE65 RNA guide
aaaagaacuacagcaaaaag

SEQ ID NO: 42153 - RNA, 20 nt, Artificial Sequence
  RPE65 RNA guide
aaagaacuacagcaaaaaga

SEQ ID NO: 42154 - RNA, 20 nt, Artificial Sequence
  RPE65 RNA guide
aaagcaaguguccaaguucu

SEQ ID NO: 42155 - RNA, 20 nt, Artificial Sequence
  RPE65 RNA guide
aaauauagaaagcaaguguc

SEQ ID NO: 42156 - RNA, 20 nt, Artificial Sequence
  RPE65 RNA guide
aaauauguugcgcuuaauuc

SEQ ID NO: 42157 - RNA, 20 nt, Artificial Sequence
  RPE65 RNA guide
aaauuacucucagacuucag

SEQ ID NO: 42158 - RNA, 20 nt, Artificial Sequence
  RPE65 RNA guide
aacagauuuguuuguaguuu

SEQ ID NO: 42159 - RNA, 20 nt, Artificial Sequence
  RPE65 RNA guide
aacuacagcaaaaagagugu

SEQ ID NO: 42160 - RNA, 20 nt, Artificial Sequence
  RPE65 RNA guide
aacuaugcacaaaaugcuau

SEQ ID NO: 42161 - RNA, 20 nt, Artificial Sequence
  RPE65 RNA guide
aacuuggacacuugcuuucu

SEQ ID NO: 42162 - RNA, 20 nt, Artificial Sequence
  RPE65 RNA guide
aagaacuacagcaaaaagag

SEQ ID NO: 42163 - RNA, 20 nt, Artificial Sequence
  RPE65 RNA guide
aagagaacuuggacacuugc

SEQ ID NO: 42164 - RNA, 20 nt, Artificial Sequence
  RPE65 RNA guide
aagaggacagauugguaaac

SEQ ID NO: 42165 - RNA, 20 nt, Artificial Sequence
  RPE65 RNA guide
aagcaaguguccaaguucuc

SEQ ID NO: 42166 - RNA, 20 nt, Artificial Sequence
  RPE65 RNA guide
aagcauguaugugugcauaa

SEQ ID NO: 42167 - RNA, 20 nt, Artificial Sequence
  RPE65 RNA guide
aagcgcaacauauuuaguac

SEQ ID NO: 42168 - RNA, 20 nt, Artificial Sequence
  RPE65 RNA guide
aaggaugacgacuugaaaau

SEQ ID NO: 42169 - RNA, 20 nt, Artificial Sequence
  RPE65 RNA guide
aagggcaucauaucaaagga

SEQ ID NO: 42170 - RNA, 20 nt, Artificial Sequence
  RPE65 RNA guide
aaggggccuaaugcccaagg

SEQ ID NO: 42171 - RNA, 20 nt, Artificial Sequence
  RPE65 RNA guide
aaguacugcccucaucccua

SEQ ID NO: 42172 - RNA, 20 nt, Artificial Sequence
  RPE65 RNA guide
aagucgucauccuuugauau

SEQ ID NO: 42173 - RNA, 20 nt, Artificial Sequence
  RPE65 RNA guide
aaguguccaaguucucuucu

SEQ ID NO: 42174 - RNA, 20 nt, Artificial Sequence
  RPE65 RNA guide
aauauagaaagcaagugucc

SEQ ID NO: 42175 - RNA, 20 nt, Artificial Sequence
  RPE65 RNA guide
aauauguugcgcuuaauucc

SEQ ID NO: 42176 - RNA, 20 nt, Artificial Sequence
  RPE65 RNA guide
aauauucuagaagagaacuu

SEQ ID NO: 42177 - RNA, 20 nt, Artificial Sequence
  RPE65 RNA guide
aaucuguccucuucugaaaa

SEQ ID NO: 42178 - RNA, 20 nt, Artificial Sequence
  RPE65 RNA guide
aaugcccaagggcaucauau

SEQ ID NO: 42179 - RNA, 20 nt, Artificial Sequence
  RPE65 RNA guide
aaugucagaauagcauuuug

SEQ ID NO: 42180 - RNA, 20 nt, Artificial Sequence
  RPE65 RNA guide
aauuacucucagacuucaga

SEQ ID NO: 42181 - RNA, 20 nt, Artificial Sequence
  RPE65 RNA guide
aauucuaggguacacucuuu

SEQ ID NO: 42182 - RNA, 20 nt, Artificial Sequence
  RPE65 RNA guide
aauuuugccuagcacaugaa

SEQ ID NO: 42183 - RNA, 20 nt, Artificial Sequence
  RPE65 RNA guide
acacucucauauauguaugu

SEQ ID NO: 42184 - RNA, 20 nt, Artificial Sequence
  RPE65 RNA guide
acacucuuuuugcuguaguu

SEQ ID NO: 42185 - RNA, 20 nt, Artificial Sequence
  RPE65 RNA guide
acacuuauuuucagaagagg

SEQ ID NO: 42186 - RNA, 20 nt, Artificial Sequence
  RPE65 RNA guide
acagauuuguuuguaguuuu

SEQ ID NO: 42187 - RNA, 20 nt, Artificial Sequence
  RPE65 RNA guide
acagcaaaaagaguguaccc

SEQ ID NO: 42188 - RNA, 20 nt, Artificial Sequence
  RPE65 RNA guide
accaaucuguccucuucuga

SEQ ID NO: 42189 - RNA, 20 nt, Artificial Sequence
  RPE65 RNA guide
acccuauaaggggccuaaug

SEQ ID NO: 42190 - RNA, 20 nt, Artificial Sequence
  RPE65 RNA guide
acuaaauauguugcgcuuaa

SEQ ID NO: 42191 - RNA, 20 nt, Artificial Sequence
  RPE65 RNA guide
acuacagcaaaaagagugua

SEQ ID NO: 42192 - RNA, 20 nt, Artificial Sequence
  RPE65 RNA guide
acuaugcacaaaaugcuauu

SEQ ID NO: 42193 - RNA, 20 nt, Artificial Sequence
  RPE65 RNA guide
acucucagacuucagaagua

SEQ ID NO: 42194 - RNA, 20 nt, Artificial Sequence
  RPE65 RNA guide
acugcccucaucccuacccu

SEQ ID NO: 42195 - RNA, 20 nt, Artificial Sequence
  RPE65 RNA guide
acuuagcaaacauuuauuga

SEQ ID NO: 42196 - RNA, 20 nt, Artificial Sequence
  RPE65 RNA guide
acuuauucaugugcuaggca

SEQ ID NO: 42197 - RNA, 20 nt, Artificial Sequence
  RPE65 RNA guide
acuuauuuucagaagaggac

SEQ ID NO: 42198 - RNA, 20 nt, Artificial Sequence
  RPE65 RNA guide
acuucagaaguacugcccuc

SEQ ID NO: 42199 - RNA, 20 nt, Artificial Sequence
  RPE65 RNA guide
acuucugaagucugagagua

SEQ ID NO: 42200 - RNA, 20 nt, Artificial Sequence
  RPE65 RNA guide
acuuggacacuugcuuucua

SEQ ID NO: 42201 - RNA, 20 nt, Artificial Sequence
  RPE65 RNA guide
agaaagcaaguguccaaguu

SEQ ID NO: 42202 - RNA, 20 nt, Artificial Sequence
  RPE65 RNA guide
agaacuacagcaaaaagagu

SEQ ID NO: 42203 - RNA, 20 nt, Artificial Sequence
  RPE65 RNA guide
agaacuuggacacuugcuuu

SEQ ID NO: 42204 - RNA, 20 nt, Artificial Sequence
  RPE65 RNA guide
agaagagaacuuggacacuu

SEQ ID NO: 42205 - RNA, 20 nt, Artificial Sequence
  RPE65 RNA guide
agaagaggacagauugguaa

SEQ ID NO: 42206 - RNA, 20 nt, Artificial Sequence
  RPE65 RNA guide
agaaguacugcccucauccc

SEQ ID NO: 42207 - RNA, 20 nt, Artificial Sequence
  RPE65 RNA guide
agaaugucagaauagcauuu

SEQ ID NO: 42208 - RNA, 20 nt, Artificial Sequence
  RPE65 RNA guide
agacacuuauuuucagaaga

SEQ ID NO: 42209 - RNA, 20 nt, Artificial Sequence
  RPE65 RNA guide
agacuucagaaguacugccc

SEQ ID NO: 42210 - RNA, 20 nt, Artificial Sequence
  RPE65 RNA guide
agagaacuuggacacuugcu

SEQ ID NO: 42211 - RNA, 20 nt, Artificial Sequence
  RPE65 RNA guide
agaguguacuaaauauguug

SEQ ID NO: 42212 - RNA, 20 nt, Artificial Sequence
  RPE65 RNA guide
agcaaaaagaguguacccua

SEQ ID NO: 42213 - RNA, 20 nt, Artificial Sequence
  RPE65 RNA guide
agcaaguguccaaguucucu

SEQ ID NO: 42214 - RNA, 20 nt, Artificial Sequence
  RPE65 RNA guide
agcacaugaauaagugcuca

SEQ ID NO: 42215 - RNA, 20 nt, Artificial Sequence
  RPE65 RNA guide
agcacuuauucaugugcuag

SEQ ID NO: 42216 - RNA, 20 nt, Artificial Sequence
  RPE65 RNA guide
agcauacauacauauaugag

SEQ ID NO: 42217 - RNA, 20 nt, Artificial Sequence
  RPE65 RNA guide
agcauguaugugugcauaau

SEQ ID NO: 42218 - RNA, 20 nt, Artificial Sequence
  RPE65 RNA guide
agcgcaacauauuuaguaca

SEQ ID NO: 42219 - RNA, 20 nt, Artificial Sequence
  RPE65 RNA guide
aggaugacgacuugaaaaua

SEQ ID NO: 42220 - RNA, 20 nt, Artificial Sequence
  RPE65 RNA guide
aggccccuuauaggguaggg

SEQ ID NO: 42221 - RNA, 20 nt, Artificial Sequence
  RPE65 RNA guide
agggaugagggcaguacuuc

SEQ ID NO: 42222 - RNA, 20 nt, Artificial Sequence
  RPE65 RNA guide
agggcaguacuucugaaguc

SEQ ID NO: 42223 - RNA, 20 nt, Artificial Sequence
  RPE65 RNA guide
agggcaucauaucaaaggau

SEQ ID NO: 42224 - RNA, 20 nt, Artificial Sequence
  RPE65 RNA guide
aggggccuaaugcccaaggg

SEQ ID NO: 42225 - RNA, 20 nt, Artificial Sequence
  RPE65 RNA guide
aggguacacucuuuuugcug

SEQ ID NO: 42226 - RNA, 20 nt, Artificial Sequence
  RPE65 RNA guide
aggguagggaugagggcagu

SEQ ID NO: 42227 - RNA, 20 nt, Artificial Sequence
  RPE65 RNA guide
aguacugcccucaucccuac

SEQ ID NO: 42228 - RNA, 20 nt, Artificial Sequence
  RPE65 RNA guide
aguacuucugaagucugaga

SEQ ID NO: 42229 - RNA, 20 nt, Artificial Sequence
  RPE65 RNA guide
agucgucauccuuugauaug

SEQ ID NO: 42230 - RNA, 20 nt, Artificial Sequence
  RPE65 RNA guide
agucugagaguaauuuaacu

SEQ ID NO: 42231 - RNA, 20 nt, Artificial Sequence
  RPE65 RNA guide
agugcucaauaaauguuugc

SEQ ID NO: 42232 - RNA, 20 nt, Artificial Sequence
  RPE65 RNA guide
aguguacuaaauauguugcg

SEQ ID NO: 42233 - RNA, 20 nt, Artificial Sequence
  RPE65 RNA guide
aguguccaaguucucuucua

SEQ ID NO: 42234 - RNA, 20 nt, Artificial Sequence
  RPE65 RNA guide
aguuaaauuacucucagacu

SEQ ID NO: 42235 - RNA, 20 nt, Artificial Sequence
  RPE65 RNA guide
aguuuaccaaucuguccucu

SEQ ID NO: 42236 - RNA, 20 nt, Artificial Sequence
  RPE65 RNA guide
aguuuugggaauuaagcgca

SEQ ID NO: 42237 - RNA, 20 nt, Artificial Sequence
  RPE65 RNA guide
auaaggggccuaaugcccaa

SEQ ID NO: 42238 - RNA, 20 nt, Artificial Sequence
  RPE65 RNA guide
auagaaagcaaguguccaag

SEQ ID NO: 42239 - RNA, 20 nt, Artificial Sequence
  RPE65 RNA guide
auagacacuuauuuucagaa

SEQ ID NO: 42240 - RNA, 20 nt, Artificial Sequence
  RPE65 RNA guide
auaggguagggaugagggca

SEQ ID NO: 42241 - RNA, 20 nt, Artificial Sequence
  RPE65 RNA guide
auauagaaagcaagugucca

SEQ ID NO: 42242 - RNA, 20 nt, Artificial Sequence
  RPE65 RNA guide
auaucaaaggaugacgacuu

SEQ ID NO: 42243 - RNA, 20 nt, Artificial Sequence
  RPE65 RNA guide
auaugaugcccuugggcauu

SEQ ID NO: 42244 - RNA, 20 nt, Artificial Sequence
  RPE65 RNA guide
auauguugcgcuuaauuccc

SEQ ID NO: 42245 - RNA, 20 nt, Artificial Sequence
  RPE65 RNA guide
auauucuagaagagaacuug

SEQ ID NO: 42246 - RNA, 20 nt, Artificial Sequence
  RPE65 RNA guide
auauuuucaagucgucaucc

SEQ ID NO: 42247 - RNA, 20 nt, Artificial Sequence
  RPE65 RNA guide
aucaaaggaugacgacuuga

SEQ ID NO: 42248 - RNA, 20 nt, Artificial Sequence
  RPE65 RNA guide
aucauaucaaaggaugacga

SEQ ID NO: 42249 - RNA, 20 nt, Artificial Sequence
  RPE65 RNA guide
aucccuacccuauaaggggc

SEQ ID NO: 42250 - RNA, 20 nt, Artificial Sequence
  RPE65 RNA guide
auccuuugauaugaugcccu

SEQ ID NO: 42251 - RNA, 20 nt, Artificial Sequence
  RPE65 RNA guide
aucuguccucuucugaaaau

SEQ ID NO: 42252 - RNA, 20 nt, Artificial Sequence
  RPE65 RNA guide
augagaguguacuaaauaug

SEQ ID NO: 42253 - RNA, 20 nt, Artificial Sequence
  RPE65 RNA guide
augagggcaguacuucugaa

SEQ ID NO: 42254 - RNA, 20 nt, Artificial Sequence
  RPE65 RNA guide
augaugcccuugggcauuag

SEQ ID NO: 42255 - RNA, 20 nt, Artificial Sequence
  RPE65 RNA guide
augcacaaaaugcuauucug

SEQ ID NO: 42256 - RNA, 20 nt, Artificial Sequence
  RPE65 RNA guide
augcccaagggcaucauauc

SEQ ID NO: 42257 - RNA, 20 nt, Artificial Sequence
  RPE65 RNA guide
augcccuugggcauuaggcc

SEQ ID NO: 42258 - RNA, 20 nt, Artificial Sequence
  RPE65 RNA guide
augcuauuaugcacacauac

SEQ ID NO: 42259 - RNA, 20 nt, Artificial Sequence
  RPE65 RNA guide
auguaugcuauuaugcacac

SEQ ID NO: 42260 - RNA, 20 nt, Artificial Sequence
  RPE65 RNA guide
auguauguaugcuauuaugc

SEQ ID NO: 42261 - RNA, 20 nt, Artificial Sequence
  RPE65 RNA guide
auguaugugugcauaauagc

SEQ ID NO: 42262 - RNA, 20 nt, Artificial Sequence
  RPE65 RNA guide
augucagaauagcauuuugu

SEQ ID NO: 42263 - RNA, 20 nt, Artificial Sequence
  RPE65 RNA guide
augugugcauaauagcauac

SEQ ID NO: 42264 - RNA, 20 nt, Artificial Sequence
  RPE65 RNA guide
auguugcgcuuaauucccaa

SEQ ID NO: 42265 - RNA, 20 nt, Artificial Sequence
  RPE65 RNA guide
auuacucucagacuucagaa

SEQ ID NO: 42266 - RNA, 20 nt, Artificial Sequence
  RPE65 RNA guide
auuaggccccuuauagggua

SEQ ID NO: 42267 - RNA, 20 nt, Artificial Sequence
  RPE65 RNA guide
auucuagaagagaacuugga

SEQ ID NO: 42268 - RNA, 20 nt, Artificial Sequence
  RPE65 RNA guide
auucuaggguacacucuuuu

SEQ ID NO: 42269 - RNA, 20 nt, Artificial Sequence
  RPE65 RNA guide
auugagcacuuauucaugug

SEQ ID NO: 42270 - RNA, 20 nt, Artificial Sequence
  RPE65 RNA guide
auuuucaagucgucauccuu

SEQ ID NO: 42271 - RNA, 20 nt, Artificial Sequence
  RPE65 RNA guide
auuuucagaagaggacagau

SEQ ID NO: 42272 - RNA, 20 nt, Artificial Sequence
  RPE65 RNA guide
auuuugccuagcacaugaau

SEQ ID NO: 42273 - RNA, 20 nt, Artificial Sequence
  RPE65 RNA guide
caaaggaugacgacuugaaa

SEQ ID NO: 42274 - RNA, 20 nt, Artificial Sequence
  RPE65 RNA guide
caagggcaucauaucaaagg

SEQ ID NO: 42275 - RNA, 20 nt, Artificial Sequence
  RPE65 RNA guide
caagucgucauccuuugaua

SEQ ID NO: 42276 - RNA, 20 nt, Artificial Sequence
  RPE65 RNA guide
caaguguccaaguucucuuc

SEQ ID NO: 42277 - RNA, 20 nt, Artificial Sequence
  RPE65 RNA guide
caaucuguccucuucugaaa

SEQ ID NO: 42278 - RNA, 20 nt, Artificial Sequence
  RPE65 RNA guide
cacaaaaugcuauucugaca

SEQ ID NO: 42279 - RNA, 20 nt, Artificial Sequence
  RPE65 RNA guide
cacaauacaguaacuuucuc

SEQ ID NO: 42280 - RNA, 20 nt, Artificial Sequence
  RPE65 RNA guide
cacucucauauauguaugua

SEQ ID NO: 42281 - RNA, 20 nt, Artificial Sequence
  RPE65 RNA guide
cacucuuuuugcuguaguuc

SEQ ID NO: 42282 - RNA, 20 nt, Artificial Sequence
  RPE65 RNA guide
cacuuauucaugugcuaggc

SEQ ID NO: 42283 - RNA, 20 nt, Artificial Sequence
  RPE65 RNA guide
cacuuauuuucagaagagga

SEQ ID NO: 42284 - RNA, 20 nt, Artificial Sequence
  RPE65 RNA guide
cagaagaggacagauuggua

SEQ ID NO: 42285 - RNA, 20 nt, Artificial Sequence
  RPE65 RNA guide
cagaaguacugcccucaucc

SEQ ID NO: 42286 - RNA, 20 nt, Artificial Sequence
  RPE65 RNA guide
cagaauagcauuuugugcau

SEQ ID NO: 42287 - RNA, 20 nt, Artificial Sequence
  RPE65 RNA guide
cagacuucagaaguacugcc

SEQ ID NO: 42288 - RNA, 20 nt, Artificial Sequence
  RPE65 RNA guide
cagauuuguuuguaguuuug

SEQ ID NO: 42289 - RNA, 20 nt, Artificial Sequence
  RPE65 RNA guide
cagcaaaaagaguguacccu

SEQ ID NO: 42290 - RNA, 20 nt, Artificial Sequence
  RPE65 RNA guide
caguaacuuucucacaauau

SEQ ID NO: 42291 - RNA, 20 nt, Artificial Sequence
  RPE65 RNA guide
caguacuucugaagucugag

SEQ ID NO: 42292 - RNA, 20 nt, Artificial Sequence
  RPE65 RNA guide
cauaucaaaggaugacgacu

SEQ ID NO: 42293 - RNA, 20 nt, Artificial Sequence
  RPE65 RNA guide
caucauaucaaaggaugacg

SEQ ID NO: 42294 - RNA, 20 nt, Artificial Sequence
  RPE65 RNA guide
caucccuacccuauaagggg

SEQ ID NO: 42295 - RNA, 20 nt, Artificial Sequence
  RPE65 RNA guide
cauccuuugauaugaugccc

SEQ ID NO: 42296 - RNA, 20 nt, Artificial Sequence
  RPE65 RNA guide
cauguaugugugcauaauag

SEQ ID NO: 42297 - RNA, 20 nt, Artificial Sequence
  RPE65 RNA guide
cauuaggccccuuauagggu

SEQ ID NO: 42298 - RNA, 20 nt, Artificial Sequence
  RPE65 RNA guide
ccaagggcaucauaucaaag

SEQ ID NO: 42299 - RNA, 20 nt, Artificial Sequence
  RPE65 RNA guide
ccaaucuguccucuucugaa

SEQ ID NO: 42300 - RNA, 20 nt, Artificial Sequence
  RPE65 RNA guide
cccaaaacuacaaacaaauc

SEQ ID NO: 42301 - RNA, 20 nt, Artificial Sequence
  RPE65 RNA guide
cccaagggcaucauaucaaa

SEQ ID NO: 42302 - RNA, 20 nt, Artificial Sequence
  RPE65 RNA guide
ccccuuauaggguagggaug

SEQ ID NO: 42303 - RNA, 20 nt, Artificial Sequence
  RPE65 RNA guide
cccuacccuauaaggggccu

SEQ ID NO: 42304 - RNA, 20 nt, Artificial Sequence
  RPE65 RNA guide
cccuauaaggggccuaaugc

SEQ ID NO: 42305 - RNA, 20 nt, Artificial Sequence
  RPE65 RNA guide
cccucaucccuacccuauaa

SEQ ID NO: 42306 - RNA, 20 nt, Artificial Sequence
  RPE65 RNA guide
cccuuauaggguagggauga

SEQ ID NO: 42307 - RNA, 20 nt, Artificial Sequence
  RPE65 RNA guide
cccuugggcauuaggccccu

SEQ ID NO: 42308 - RNA, 20 nt, Artificial Sequence
  RPE65 RNA guide
ccuaaugcccaagggcauca

SEQ ID NO: 42309 - RNA, 20 nt, Artificial Sequence
  RPE65 RNA guide
ccuacccuauaaggggccua

SEQ ID NO: 42310 - RNA, 20 nt, Artificial Sequence
  RPE65 RNA guide
ccuagcacaugaauaagugc

SEQ ID NO: 42311 - RNA, 20 nt, Artificial Sequence
  RPE65 RNA guide
ccuauaaggggccuaaugcc

SEQ ID NO: 42312 - RNA, 20 nt, Artificial Sequence
  RPE65 RNA guide
ccucaucccuacccuauaag

SEQ ID NO: 42313 - RNA, 20 nt, Artificial Sequence
  RPE65 RNA guide
ccucuucugaaaauaagugu

SEQ ID NO: 42314 - RNA, 20 nt, Artificial Sequence
  RPE65 RNA guide
ccuuauaggguagggaugag

SEQ ID NO: 42315 - RNA, 20 nt, Artificial Sequence
  RPE65 RNA guide
ccuugggcauuaggccccuu

SEQ ID NO: 42316 - RNA, 20 nt, Artificial Sequence
  RPE65 RNA guide
ccuuugauaugaugcccuug

SEQ ID NO: 42317 - RNA, 20 nt, Artificial Sequence
  RPE65 RNA guide
cgacuugaaaauauagaaag

SEQ ID NO: 42318 - RNA, 20 nt, Artificial Sequence
  RPE65 RNA guide
cgcaacauauuuaguacacu

SEQ ID NO: 42319 - RNA, 20 nt, Artificial Sequence
  RPE65 RNA guide
cgcuuaauucccaaaacuac

SEQ ID NO: 42320 - RNA, 20 nt, Artificial Sequence
  RPE65 RNA guide
cgucauccuuugauaugaug

SEQ ID NO: 42321 - RNA, 20 nt, Artificial Sequence
  RPE65 RNA guide
cuaaauauguugcgcuuaau

SEQ ID NO: 42322 - RNA, 20 nt, Artificial Sequence
  RPE65 RNA guide
cuaaugcccaagggcaucau

SEQ ID NO: 42323 - RNA, 20 nt, Artificial Sequence
  RPE65 RNA guide
cuacagcaaaaagaguguac

SEQ ID NO: 42324 - RNA, 20 nt, Artificial Sequence
  RPE65 RNA guide
cuacccuauaaggggccuaa

SEQ ID NO: 42325 - RNA, 20 nt, Artificial Sequence
  RPE65 RNA guide
cuagaagagaacuuggacac

SEQ ID NO: 42326 - RNA, 20 nt, Artificial Sequence
  RPE65 RNA guide
cuagcacaugaauaagugcu

SEQ ID NO: 42327 - RNA, 20 nt, Artificial Sequence
  RPE65 RNA guide
cuaggguacacucuuuuugc

SEQ ID NO: 42328 - RNA, 20 nt, Artificial Sequence
  RPE65 RNA guide
cuauaaggggccuaaugccc

SEQ ID NO: 42329 - RNA, 20 nt, Artificial Sequence
  RPE65 RNA guide
cuauauuuucaagucgucau

SEQ ID NO: 42330 - RNA, 20 nt, Artificial Sequence
  RPE65 RNA guide
cuaugcacaaaaugcuauuc

SEQ ID NO: 42331 - RNA, 20 nt, Artificial Sequence
  RPE65 RNA guide
cuauuaugcacacauacaug

SEQ ID NO: 42332 - RNA, 20 nt, Artificial Sequence
  RPE65 RNA guide
cucacaauacaguaacuuuc

SEQ ID NO: 42333 - RNA, 20 nt, Artificial Sequence
  RPE65 RNA guide
cucagacuucagaaguacug

SEQ ID NO: 42334 - RNA, 20 nt, Artificial Sequence
  RPE65 RNA guide
cucaucccuacccuauaagg

SEQ ID NO: 42335 - RNA, 20 nt, Artificial Sequence
  RPE65 RNA guide
cucucagacuucagaaguac

SEQ ID NO: 42336 - RNA, 20 nt, Artificial Sequence
  RPE65 RNA guide
cucuuuuugcuguaguucuu

SEQ ID NO: 42337 - RNA, 20 nt, Artificial Sequence
  RPE65 RNA guide
cugaagucugagaguaauuu

SEQ ID NO: 42338 - RNA, 20 nt, Artificial Sequence
  RPE65 RNA guide
cugacauucuuaucuuucuc

SEQ ID NO: 42339 - RNA, 20 nt, Artificial Sequence
  RPE65 RNA guide
cugagaguaauuuaacuaug

SEQ ID NO: 42340 - RNA, 20 nt, Artificial Sequence
  RPE65 RNA guide
cugcccucaucccuacccua

SEQ ID NO: 42341 - RNA, 20 nt, Artificial Sequence
  RPE65 RNA guide
cuguccucuucugaaaauaa

SEQ ID NO: 42342 - RNA, 20 nt, Artificial Sequence
  RPE65 RNA guide
cuuagcaaacauuuauugag

SEQ ID NO: 42343 - RNA, 20 nt, Artificial Sequence
  RPE65 RNA guide
cuuauaggguagggaugagg

SEQ ID NO: 42344 - RNA, 20 nt, Artificial Sequence
  RPE65 RNA guide
cuuauucaugugcuaggcaa

SEQ ID NO: 42345 - RNA, 20 nt, Artificial Sequence
  RPE65 RNA guide
cuuauuuucagaagaggaca

SEQ ID NO: 42346 - RNA, 20 nt, Artificial Sequence
  RPE65 RNA guide
cuucagaaguacugcccuca

SEQ ID NO: 42347 - RNA, 20 nt, Artificial Sequence
  RPE65 RNA guide
cuucugaagucugagaguaa

SEQ ID NO: 42348 - RNA, 20 nt, Artificial Sequence
  RPE65 RNA guide
cuugcuuucuauauuuucaa

SEQ ID NO: 42349 - RNA, 20 nt, Artificial Sequence
  RPE65 RNA guide
cuuggacacuugcuuucuau

SEQ ID NO: 42350 - RNA, 20 nt, Artificial Sequence
  RPE65 RNA guide
cuugggcauuaggccccuua

SEQ ID NO: 42351 - RNA, 20 nt, Artificial Sequence
  RPE65 RNA guide
cuuucucacaauacaguaac

SEQ ID NO: 42352 - RNA, 20 nt, Artificial Sequence
  RPE65 RNA guide
cuuugauaugaugcccuugg

SEQ ID NO: 42353 - RNA, 20 nt, Artificial Sequence
  RPE65 RNA guide
gaaaaagaacuacagcaaaa

SEQ ID NO: 42354 - RNA, 20 nt, Artificial Sequence
  RPE65 RNA guide
gaaaauauagaaagcaagug

SEQ ID NO: 42355 - RNA, 20 nt, Artificial Sequence
  RPE65 RNA guide
gaaagauaagaaugucagaa

SEQ ID NO: 42356 - RNA, 20 nt, Artificial Sequence
  RPE65 RNA guide
gaaagcaaguguccaaguuc

SEQ ID NO: 42357 - RNA, 20 nt, Artificial Sequence
  RPE65 RNA guide
gaaaguuacuguauugugag

SEQ ID NO: 42358 - RNA, 20 nt, Artificial Sequence
  RPE65 RNA guide
gaacuacagcaaaaagagug

SEQ ID NO: 42359 - RNA, 20 nt, Artificial Sequence
  RPE65 RNA guide
gaacuuggacacuugcuuuc

SEQ ID NO: 42360 - RNA, 20 nt, Artificial Sequence
  RPE65 RNA guide
gaagagaacuuggacacuug

SEQ ID NO: 42361 - RNA, 20 nt, Artificial Sequence
  RPE65 RNA guide
gaagaggacagauugguaaa

SEQ ID NO: 42362 - RNA, 20 nt, Artificial Sequence
  RPE65 RNA guide
gaaguacugcccucaucccu

SEQ ID NO: 42363 - RNA, 20 nt, Artificial Sequence
  RPE65 RNA guide
gaaugucagaauagcauuuu

SEQ ID NO: 42364 - RNA, 20 nt, Artificial Sequence
  RPE65 RNA guide
gacacuuauuuucagaagag

SEQ ID NO: 42365 - RNA, 20 nt, Artificial Sequence
  RPE65 RNA guide
gacgacuugaaaauauagaa

SEQ ID NO: 42366 - RNA, 20 nt, Artificial Sequence
  RPE65 RNA guide
gacuucagaaguacugcccu

SEQ ID NO: 42367 - RNA, 20 nt, Artificial Sequence
  RPE65 RNA guide
gagaaaguuacuguauugug

SEQ ID NO: 42368 - RNA, 20 nt, Artificial Sequence
  RPE65 RNA guide
gagaacuuggacacuugcuu

SEQ ID NO: 42369 - RNA, 20 nt, Artificial Sequence
  RPE65 RNA guide
gagaguguacuaaauauguu

SEQ ID NO: 42370 - RNA, 20 nt, Artificial Sequence
  RPE65 RNA guide
gagcacuuauucaugugcua

SEQ ID NO: 42371 - RNA, 20 nt, Artificial Sequence
  RPE65 RNA guide
gagggcaguacuucugaagu

SEQ ID NO: 42372 - RNA, 20 nt, Artificial Sequence
  RPE65 RNA guide
gaguguacuaaauauguugc

SEQ ID NO: 42373 - RNA, 20 nt, Artificial Sequence
  RPE65 RNA guide
gaguuuaccaaucuguccuc

SEQ ID NO: 42374 - RNA, 20 nt, Artificial Sequence
  RPE65 RNA guide
gauaugaugcccuugggcau

SEQ ID NO: 42375 - RNA, 20 nt, Artificial Sequence
  RPE65 RNA guide
gaugagggcaguacuucuga

SEQ ID NO: 42376 - RNA, 20 nt, Artificial Sequence
  RPE65 RNA guide
gaugcccuugggcauuaggc

SEQ ID NO: 42377 - RNA, 20 nt, Artificial Sequence
  RPE65 RNA guide
gcaaaaagaguguacccuag

SEQ ID NO: 42378 - RNA, 20 nt, Artificial Sequence
  RPE65 RNA guide
gcaacauauuuaguacacuc

SEQ ID NO: 42379 - RNA, 20 nt, Artificial Sequence
  RPE65 RNA guide
gcaaguguccaaguucucuu

SEQ ID NO: 42380 - RNA, 20 nt, Artificial Sequence
  RPE65 RNA guide
gcacaaaaugcuauucugac

SEQ ID NO: 42381 - RNA, 20 nt, Artificial Sequence
  RPE65 RNA guide
gcacaugaauaagugcucaa

SEQ ID NO: 42382 - RNA, 20 nt, Artificial Sequence
  RPE65 RNA guide
gcacuuauucaugugcuagg

SEQ ID NO: 42383 - RNA, 20 nt, Artificial Sequence
  RPE65 RNA guide
gcaguacuucugaagucuga

SEQ ID NO: 42384 - RNA, 20 nt, Artificial Sequence
  RPE65 RNA guide
gcauacauacauauaugaga

SEQ ID NO: 42385 - RNA, 20 nt, Artificial Sequence
  RPE65 RNA guide
gcauaguuaaauuacucuca

SEQ ID NO: 42386 - RNA, 20 nt, Artificial Sequence
  RPE65 RNA guide
gcaucauaucaaaggaugac

SEQ ID NO: 42387 - RNA, 20 nt, Artificial Sequence
  RPE65 RNA guide
gcauguaugugugcauaaua

SEQ ID NO: 42388 - RNA, 20 nt, Artificial Sequence
  RPE65 RNA guide
gcauuaggccccuuauaggg

SEQ ID NO: 42389 - RNA, 20 nt, Artificial Sequence
  RPE65 RNA guide
gcccaagggcaucauaucaa

SEQ ID NO: 42390 - RNA, 20 nt, Artificial Sequence
  RPE65 RNA guide
gccccuuauaggguagggau

SEQ ID NO: 42391 - RNA, 20 nt, Artificial Sequence
  RPE65 RNA guide
gcccucaucccuacccuaua

SEQ ID NO: 42392 - RNA, 20 nt, Artificial Sequence
  RPE65 RNA guide
gcccuugggcauuaggcccc

SEQ ID NO: 42393 - RNA, 20 nt, Artificial Sequence
  RPE65 RNA guide
gccuaaugcccaagggcauc

SEQ ID NO: 42394 - RNA, 20 nt, Artificial Sequence
  RPE65 RNA guide
gccuagcacaugaauaagug

SEQ ID NO: 42395 - RNA, 20 nt, Artificial Sequence
  RPE65 RNA guide
gcgcaacauauuuaguacac

SEQ ID NO: 42396 - RNA, 20 nt, Artificial Sequence
  RPE65 RNA guide
gcgcuuaauucccaaaacua

SEQ ID NO: 42397 - RNA, 20 nt, Artificial Sequence
  RPE65 RNA guide
gcuauuaugcacacauacau

SEQ ID NO: 42398 - RNA, 20 nt, Artificial Sequence
  RPE65 RNA guide
gcuauucugacauucuuauc

SEQ ID NO: 42399 - RNA, 20 nt, Artificial Sequence
  RPE65 RNA guide
gcuguaguucuuuuucuaua

SEQ ID NO: 42400 - RNA, 20 nt, Artificial Sequence
  RPE65 RNA guide
gcuuaauucccaaaacuaca

SEQ ID NO: 42401 - RNA, 20 nt, Artificial Sequence
  RPE65 RNA guide
gcuuucuauauuuucaaguc

SEQ ID NO: 42402 - RNA, 20 nt, Artificial Sequence
  RPE65 RNA guide
ggaauuaagcgcaacauauu

SEQ ID NO: 42403 - RNA, 20 nt, Artificial Sequence
  RPE65 RNA guide
ggacacuugcuuucuauauu

SEQ ID NO: 42404 - RNA, 20 nt, Artificial Sequence
  RPE65 RNA guide
ggaugacgacuugaaaauau

SEQ ID NO: 42405 - RNA, 20 nt, Artificial Sequence
  RPE65 RNA guide
ggaugagggcaguacuucug

SEQ ID NO: 42406 - RNA, 20 nt, Artificial Sequence
  RPE65 RNA guide
ggcaguacuucugaagucug

SEQ ID NO: 42407 - RNA, 20 nt, Artificial Sequence
  RPE65 RNA guide
ggcaucauaucaaaggauga

SEQ ID NO: 42408 - RNA, 20 nt, Artificial Sequence
  RPE65 RNA guide
ggcauuaggccccuuauagg

SEQ ID NO: 42409 - RNA, 20 nt, Artificial Sequence
  RPE65 RNA guide
ggccccuuauaggguaggga

SEQ ID NO: 42410 - RNA, 20 nt, Artificial Sequence
  RPE65 RNA guide
ggccuaaugcccaagggcau

SEQ ID NO: 42411 - RNA, 20 nt, Artificial Sequence
  RPE65 RNA guide
gggaauuaagcgcaacauau

SEQ ID NO: 42412 - RNA, 20 nt, Artificial Sequence
  RPE65 RNA guide
gggaugagggcaguacuucu

SEQ ID NO: 42413 - RNA, 20 nt, Artificial Sequence
  RPE65 RNA guide
gggcaguacuucugaagucu

SEQ ID NO: 42414 - RNA, 20 nt, Artificial Sequence
  RPE65 RNA guide
gggcaucauaucaaaggaug

SEQ ID NO: 42415 - RNA, 20 nt, Artificial Sequence
  RPE65 RNA guide
gggcauuaggccccuuauag

SEQ ID NO: 42416 - RNA, 20 nt, Artificial Sequence
  RPE65 RNA guide
gggccuaaugcccaagggca

SEQ ID NO: 42417 - RNA, 20 nt, Artificial Sequence
  RPE65 RNA guide
ggggccuaaugcccaagggc

SEQ ID NO: 42418 - RNA, 20 nt, Artificial Sequence
  RPE65 RNA guide
ggguacacucuuuuugcugu

SEQ ID NO: 42419 - RNA, 20 nt, Artificial Sequence
  RPE65 RNA guide
ggguagggaugagggcagua

SEQ ID NO: 42420 - RNA, 20 nt, Artificial Sequence
  RPE65 RNA guide
gguacacucuuuuugcugua

SEQ ID NO: 42421 - RNA, 20 nt, Artificial Sequence
  RPE65 RNA guide
gguagggaugagggcaguac

SEQ ID NO: 42422 - RNA, 20 nt, Artificial Sequence
  RPE65 RNA guide
guaacuuucucacaauauag

SEQ ID NO: 42423 - RNA, 20 nt, Artificial Sequence
  RPE65 RNA guide
guacacucuuuuugcuguag

SEQ ID NO: 42424 - RNA, 20 nt, Artificial Sequence
  RPE65 RNA guide
guacuauagaaaaagaacua

SEQ ID NO: 42425 - RNA, 20 nt, Artificial Sequence
  RPE65 RNA guide
guacugcccucaucccuacc

SEQ ID NO: 42426 - RNA, 20 nt, Artificial Sequence
  RPE65 RNA guide
guacuucugaagucugagag

SEQ ID NO: 42427 - RNA, 20 nt, Artificial Sequence
  RPE65 RNA guide
guagggaugagggcaguacu

SEQ ID NO: 42428 - RNA, 20 nt, Artificial Sequence
  RPE65 RNA guide
guaguuuugggaauuaagcg

SEQ ID NO: 42429 - RNA, 20 nt, Artificial Sequence
  RPE65 RNA guide
guaugcuauuaugcacacau

SEQ ID NO: 42430 - RNA, 20 nt, Artificial Sequence
  RPE65 RNA guide
guauguaugcuauuaugcac

SEQ ID NO: 42431 - RNA, 20 nt, Artificial Sequence
  RPE65 RNA guide
guaugugugcauaauagcau

SEQ ID NO: 42432 - RNA, 20 nt, Artificial Sequence
  RPE65 RNA guide
gucagaauagcauuuugugc

SEQ ID NO: 42433 - RNA, 20 nt, Artificial Sequence
  RPE65 RNA guide
gucauccuuugauaugaugc

SEQ ID NO: 42434 - RNA, 20 nt, Artificial Sequence
  RPE65 RNA guide
guccaaguucucuucuagaa

SEQ ID NO: 42435 - RNA, 20 nt, Artificial Sequence
  RPE65 RNA guide
guccucuucugaaaauaagu

SEQ ID NO: 42436 - RNA, 20 nt, Artificial Sequence
  RPE65 RNA guide
gucgucauccuuugauauga

SEQ ID NO: 42437 - RNA, 20 nt, Artificial Sequence
  RPE65 RNA guide
gucuauauugugagaaaguu

SEQ ID NO: 42438 - RNA, 20 nt, Artificial Sequence
  RPE65 RNA guide
gucugagaguaauuuaacua

SEQ ID NO: 42439 - RNA, 20 nt, Artificial Sequence
  RPE65 RNA guide
gugagaaagauaagaauguc

SEQ ID NO: 42440 - RNA, 20 nt, Artificial Sequence
  RPE65 RNA guide
gugagaaaguuacuguauug

SEQ ID NO: 42441 - RNA, 20 nt, Artificial Sequence
  RPE65 RNA guide
gugaguuuaccaaucugucc

SEQ ID NO: 42442 - RNA, 20 nt, Artificial Sequence
  RPE65 RNA guide
gugcauaguuaaauuacucu

SEQ ID NO: 42443 - RNA, 20 nt, Artificial Sequence
  RPE65 RNA guide
gugcucaauaaauguuugcu

SEQ ID NO: 42444 - RNA, 20 nt, Artificial Sequence
  RPE65 RNA guide
guguacuaaauauguugcgc

SEQ ID NO: 42445 - RNA, 20 nt, Artificial Sequence
  RPE65 RNA guide
guguccaaguucucuucuag

SEQ ID NO: 42446 - RNA, 20 nt, Artificial Sequence
  RPE65 RNA guide
gugucuauauugugagaaag

SEQ ID NO: 42447 - RNA, 20 nt, Artificial Sequence
  RPE65 RNA guide
gugugcauaauagcauacau

SEQ ID NO: 42448 - RNA, 20 nt, Artificial Sequence
  RPE65 RNA guide
guuaaauuacucucagacuu

SEQ ID NO: 42449 - RNA, 20 nt, Artificial Sequence
  RPE65 RNA guide
guugcgcuuaauucccaaaa

SEQ ID NO: 42450 - RNA, 20 nt, Artificial Sequence
  RPE65 RNA guide
guuuaccaaucuguccucuu

SEQ ID NO: 42451 - RNA, 20 nt, Artificial Sequence
  RPE65 RNA guide
guuuguaguuuugggaauua

SEQ ID NO: 42452 - RNA, 20 nt, Artificial Sequence
  RPE65 RNA guide
guuuugggaauuaagcgcaa

SEQ ID NO: 42453 - RNA, 20 nt, Artificial Sequence
  RPE65 RNA guide
uaaauauguugcgcuuaauu

SEQ ID NO: 42454 - RNA, 20 nt, Artificial Sequence
  RPE65 RNA guide
uaaauuacucucagacuuca

SEQ ID NO: 42455 - RNA, 20 nt, Artificial Sequence
  RPE65 RNA guide
uaagcauguaugugugcaua

SEQ ID NO: 42456 - RNA, 20 nt, Artificial Sequence
  RPE65 RNA guide
uaagcgcaacauauuuagua

SEQ ID NO: 42457 - RNA, 20 nt, Artificial Sequence
  RPE65 RNA guide
uaaggggccuaaugcccaag

SEQ ID NO: 42458 - RNA, 20 nt, Artificial Sequence
  RPE65 RNA guide
uaaugcccaagggcaucaua

SEQ ID NO: 42459 - RNA, 20 nt, Artificial Sequence
  RPE65 RNA guide
uacacucuuuuugcuguagu

SEQ ID NO: 42460 - RNA, 20 nt, Artificial Sequence
  RPE65 RNA guide
uacagcaaaaagaguguacc

SEQ ID NO: 42461 - RNA, 20 nt, Artificial Sequence
  RPE65 RNA guide
uaccaaucuguccucuucug

SEQ ID NO: 42462 - RNA, 20 nt, Artificial Sequence
  RPE65 RNA guide
uacccuauaaggggccuaau

SEQ ID NO: 42463 - RNA, 20 nt, Artificial Sequence
  RPE65 RNA guide
uacucucagacuucagaagu

SEQ ID NO: 42464 - RNA, 20 nt, Artificial Sequence
  RPE65 RNA guide
uacugcccucaucccuaccc

SEQ ID NO: 42465 - RNA, 20 nt, Artificial Sequence
  RPE65 RNA guide
uacuucugaagucugagagu

SEQ ID NO: 42466 - RNA, 20 nt, Artificial Sequence
  RPE65 RNA guide
uagaaagcaaguguccaagu

SEQ ID NO: 42467 - RNA, 20 nt, Artificial Sequence
  RPE65 RNA guide
uagaagagaacuuggacacu

SEQ ID NO: 42468 - RNA, 20 nt, Artificial Sequence
  RPE65 RNA guide
uagacacuuauuuucagaag

SEQ ID NO: 42469 - RNA, 20 nt, Artificial Sequence
  RPE65 RNA guide
uagcacaugaauaagugcuc

SEQ ID NO: 42470 - RNA, 20 nt, Artificial Sequence
  RPE65 RNA guide
uaggccccuuauaggguagg

SEQ ID NO: 42471 - RNA, 20 nt, Artificial Sequence
  RPE65 RNA guide
uagggaugagggcaguacuu

SEQ ID NO: 42472 - RNA, 20 nt, Artificial Sequence
  RPE65 RNA guide
uaggguacacucuuuuugcu

SEQ ID NO: 42473 - RNA, 20 nt, Artificial Sequence
  RPE65 RNA guide
uaggguagggaugagggcag

SEQ ID NO: 42474 - RNA, 20 nt, Artificial Sequence
  RPE65 RNA guide
uaguuuugggaauuaagcgc

SEQ ID NO: 42475 - RNA, 20 nt, Artificial Sequence
  RPE65 RNA guide
uauaaggggccuaaugccca

SEQ ID NO: 42476 - RNA, 20 nt, Artificial Sequence
  RPE65 RNA guide
uauagaaagcaaguguccaa

SEQ ID NO: 42477 - RNA, 20 nt, Artificial Sequence
  RPE65 RNA guide
uauaggguagggaugagggc

SEQ ID NO: 42478 - RNA, 20 nt, Artificial Sequence
  RPE65 RNA guide
uaucaaaggaugacgacuug

SEQ ID NO: 42479 - RNA, 20 nt, Artificial Sequence
  RPE65 RNA guide
uaugaugcccuugggcauua

SEQ ID NO: 42480 - RNA, 20 nt, Artificial Sequence
  RPE65 RNA guide
uaugcacaaaaugcuauucu

SEQ ID NO: 42481 - RNA, 20 nt, Artificial Sequence
  RPE65 RNA guide
uaugcuauuaugcacacaua

SEQ ID NO: 42482 - RNA, 20 nt, Artificial Sequence
  RPE65 RNA guide
uauguugcgcuuaauuccca

SEQ ID NO: 42483 - RNA, 20 nt, Artificial Sequence
  RPE65 RNA guide
uauucuagaagagaacuugg

SEQ ID NO: 42484 - RNA, 20 nt, Artificial Sequence
  RPE65 RNA guide
uauugagcacuuauucaugu

SEQ ID NO: 42485 - RNA, 20 nt, Artificial Sequence
  RPE65 RNA guide
uauuuucaagucgucauccu

SEQ ID NO: 42486 - RNA, 20 nt, Artificial Sequence
  RPE65 RNA guide
uauuuucagaagaggacaga

SEQ ID NO: 42487 - RNA, 20 nt, Artificial Sequence
  RPE65 RNA guide
ucaaaggaugacgacuugaa

SEQ ID NO: 42488 - RNA, 20 nt, Artificial Sequence
  RPE65 RNA guide
ucaagucgucauccuuugau

SEQ ID NO: 42489 - RNA, 20 nt, Artificial Sequence
  RPE65 RNA guide
ucacaauacaguaacuuucu

SEQ ID NO: 42490 - RNA, 20 nt, Artificial Sequence
  RPE65 RNA guide
ucagaagaggacagauuggu

SEQ ID NO: 42491 - RNA, 20 nt, Artificial Sequence
  RPE65 RNA guide
ucagaaguacugcccucauc

SEQ ID NO: 42492 - RNA, 20 nt, Artificial Sequence
  RPE65 RNA guide
ucagaauagcauuuugugca

SEQ ID NO: 42493 - RNA, 20 nt, Artificial Sequence
  RPE65 RNA guide
ucagacuucagaaguacugc

SEQ ID NO: 42494 - RNA, 20 nt, Artificial Sequence
  RPE65 RNA guide
ucauaucaaaggaugacgac

SEQ ID NO: 42495 - RNA, 20 nt, Artificial Sequence
  RPE65 RNA guide
ucaucccuacccuauaaggg

SEQ ID NO: 42496 - RNA, 20 nt, Artificial Sequence
  RPE65 RNA guide
ucauccuuugauaugaugcc

SEQ ID NO: 42497 - RNA, 20 nt, Artificial Sequence
  RPE65 RNA guide
ucccaaaacuacaaacaaau

SEQ ID NO: 42498 - RNA, 20 nt, Artificial Sequence
  RPE65 RNA guide
ucccuacccuauaaggggcc

SEQ ID NO: 42499 - RNA, 20 nt, Artificial Sequence
  RPE65 RNA guide
uccucuucugaaaauaagug

SEQ ID NO: 42500 - RNA, 20 nt, Artificial Sequence
  RPE65 RNA guide
uccuuugauaugaugcccuu

SEQ ID NO: 42501 - RNA, 20 nt, Artificial Sequence
  RPE65 RNA guide
ucgucauccuuugauaugau

SEQ ID NO: 42502 - RNA, 20 nt, Artificial Sequence
  RPE65 RNA guide
ucuagaagagaacuuggaca

SEQ ID NO: 42503 - RNA, 20 nt, Artificial Sequence
  RPE65 RNA guide
ucuaggguacacucuuuuug

SEQ ID NO: 42504 - RNA, 20 nt, Artificial Sequence
  RPE65 RNA guide
ucuauauuuucaagucguca

SEQ ID NO: 42505 - RNA, 20 nt, Artificial Sequence
  RPE65 RNA guide
ucucacaauacaguaacuuu

SEQ ID NO: 42506 - RNA, 20 nt, Artificial Sequence
  RPE65 RNA guide
ucucagacuucagaaguacu

SEQ ID NO: 42507 - RNA, 20 nt, Artificial Sequence
  RPE65 RNA guide
ucugaagucugagaguaauu

SEQ ID NO: 42508 - RNA, 20 nt, Artificial Sequence
  RPE65 RNA guide
ucugacauucuuaucuuucu

SEQ ID NO: 42509 - RNA, 20 nt, Artificial Sequence
  RPE65 RNA guide
ucugagaguaauuuaacuau

SEQ ID NO: 42510 - RNA, 20 nt, Artificial Sequence
  RPE65 RNA guide
ucuguccucuucugaaaaua

SEQ ID NO: 42511 - RNA, 20 nt, Artificial Sequence
  RPE65 RNA guide
ugaaaauauagaaagcaagu

SEQ ID NO: 42512 - RNA, 20 nt, Artificial Sequence
  RPE65 RNA guide
ugacgacuugaaaauauaga

SEQ ID NO: 42513 - RNA, 20 nt, Artificial Sequence
  RPE65 RNA guide
ugagaaaguuacuguauugu

SEQ ID NO: 42514 - RNA, 20 nt, Artificial Sequence
  RPE65 RNA guide
ugagaguguacuaaauaugu

SEQ ID NO: 42515 - RNA, 20 nt, Artificial Sequence
  RPE65 RNA guide
ugagcacuuauucaugugcu

SEQ ID NO: 42516 - RNA, 20 nt, Artificial Sequence
  RPE65 RNA guide
ugagggcaguacuucugaag

SEQ ID NO: 42517 - RNA, 20 nt, Artificial Sequence
  RPE65 RNA guide
ugaguuuaccaaucuguccu

SEQ ID NO: 42518 - RNA, 20 nt, Artificial Sequence
  RPE65 RNA guide
ugauaugaugcccuugggca

SEQ ID NO: 42519 - RNA, 20 nt, Artificial Sequence
  RPE65 RNA guide
ugaugcccuugggcauuagg

SEQ ID NO: 42520 - RNA, 20 nt, Artificial Sequence
  RPE65 RNA guide
ugcacaaaaugcuauucuga

SEQ ID NO: 42521 - RNA, 20 nt, Artificial Sequence
  RPE65 RNA guide
ugcauaguuaaauuacucuc

SEQ ID NO: 42522 - RNA, 20 nt, Artificial Sequence
  RPE65 RNA guide
ugcccaagggcaucauauca

SEQ ID NO: 42523 - RNA, 20 nt, Artificial Sequence
  RPE65 RNA guide
ugcccucaucccuacccuau

SEQ ID NO: 42524 - RNA, 20 nt, Artificial Sequence
  RPE65 RNA guide
ugcccuugggcauuaggccc

SEQ ID NO: 42525 - RNA, 20 nt, Artificial Sequence
  RPE65 RNA guide
ugccuagcacaugaauaagu

SEQ ID NO: 42526 - RNA, 20 nt, Artificial Sequence
  RPE65 RNA guide
ugcgcuuaauucccaaaacu

SEQ ID NO: 42527 - RNA, 20 nt, Artificial Sequence
  RPE65 RNA guide
ugcuauuaugcacacauaca

SEQ ID NO: 42528 - RNA, 20 nt, Artificial Sequence
  RPE65 RNA guide
ugcuuucuauauuuucaagu

SEQ ID NO: 42529 - RNA, 20 nt, Artificial Sequence
  RPE65 RNA guide
uggacacuugcuuucuauau

SEQ ID NO: 42530 - RNA, 20 nt, Artificial Sequence
  RPE65 RNA guide
ugggaauuaagcgcaacaua

SEQ ID NO: 42531 - RNA, 20 nt, Artificial Sequence
  RPE65 RNA guide
ugggcauuaggccccuuaua

SEQ ID NO: 42532 - RNA, 20 nt, Artificial Sequence
  RPE65 RNA guide
uguaguuuugggaauuaagc

SEQ ID NO: 42533 - RNA, 20 nt, Artificial Sequence
  RPE65 RNA guide
uguaugcuauuaugcacaca

SEQ ID NO: 42534 - RNA, 20 nt, Artificial Sequence
  RPE65 RNA guide
uguauguaugcuauuaugca

SEQ ID NO: 42535 - RNA, 20 nt, Artificial Sequence
  RPE65 RNA guide
uguaugugugcauaauagca

SEQ ID NO: 42536 - RNA, 20 nt, Artificial Sequence
  RPE65 RNA guide
ugucagaauagcauuuugug

SEQ ID NO: 42537 - RNA, 20 nt, Artificial Sequence
  RPE65 RNA guide
uguccaaguucucuucuaga

SEQ ID NO: 42538 - RNA, 20 nt, Artificial Sequence
  RPE65 RNA guide
uguccucuucugaaaauaag

SEQ ID NO: 42539 - RNA, 20 nt, Artificial Sequence
  RPE65 RNA guide
ugugagaaagauaagaaugu

SEQ ID NO: 42540 - RNA, 20 nt, Artificial Sequence
  RPE65 RNA guide
ugugagaaaguuacuguauu

SEQ ID NO: 42541 - RNA, 20 nt, Artificial Sequence
  RPE65 RNA guide
ugugcauaguuaaauuacuc

SEQ ID NO: 42542 - RNA, 20 nt, Artificial Sequence
  RPE65 RNA guide
ugugugcauaauagcauaca

SEQ ID NO: 42543 - RNA, 20 nt, Artificial Sequence
  RPE65 RNA guide
uguugcgcuuaauucccaaa

SEQ ID NO: 42544 - RNA, 20 nt, Artificial Sequence
  RPE65 RNA guide
uguuuguaguuuugggaauu

SEQ ID NO: 42545 - RNA, 20 nt, Artificial Sequence
  RPE65 RNA guide
uuaagcgcaacauauuuagu

SEQ ID NO: 42546 - RNA, 20 nt, Artificial Sequence
  RPE65 RNA guide
uuaccaaucuguccucuucu

SEQ ID NO: 42547 - RNA, 20 nt, Artificial Sequence
  RPE65 RNA guide
uuacucucagacuucagaag

SEQ ID NO: 42548 - RNA, 20 nt, Artificial Sequence
  RPE65 RNA guide
uuaggccccuuauaggguag

SEQ ID NO: 42549 - RNA, 20 nt, Artificial Sequence
  RPE65 RNA guide
uuauaggguagggaugaggg

SEQ ID NO: 42550 - RNA, 20 nt, Artificial Sequence
  RPE65 RNA guide
uuauugagcacuuauucaug

SEQ ID NO: 42551 - RNA, 20 nt, Artificial Sequence
  RPE65 RNA guide
uuauuuucagaagaggacag

SEQ ID NO: 42552 - RNA, 20 nt, Artificial Sequence
  RPE65 RNA guide
uucaagucgucauccuuuga

SEQ ID NO: 42553 - RNA, 20 nt, Artificial Sequence
  RPE65 RNA guide
uucagaagaggacagauugg

SEQ ID NO: 42554 - RNA, 20 nt, Artificial Sequence
  RPE65 RNA guide
uucagaaguacugcccucau

SEQ ID NO: 42555 - RNA, 20 nt, Artificial Sequence
  RPE65 RNA guide
uucccaaaacuacaaacaaa

SEQ ID NO: 42556 - RNA, 20 nt, Artificial Sequence
  RPE65 RNA guide
uucuagaagagaacuuggac

SEQ ID NO: 42557 - RNA, 20 nt, Artificial Sequence
  RPE65 RNA guide
uucuaggguacacucuuuuu

SEQ ID NO: 42558 - RNA, 20 nt, Artificial Sequence
  RPE65 RNA guide
uucuauauuuucaagucguc

SEQ ID NO: 42559 - RNA, 20 nt, Artificial Sequence
  RPE65 RNA guide
uucucacaauacaguaacuu

SEQ ID NO: 42560 - RNA, 20 nt, Artificial Sequence
  RPE65 RNA guide
uucugacauucuuaucuuuc

SEQ ID NO: 42561 - RNA, 20 nt, Artificial Sequence
  RPE65 RNA guide
uugagcacuuauucaugugc

SEQ ID NO: 42562 - RNA, 20 nt, Artificial Sequence
  RPE65 RNA guide
uugauaugaugcccuugggc

SEQ ID NO: 42563 - RNA, 20 nt, Artificial Sequence
  RPE65 RNA guide
uugccuagcacaugaauaag

SEQ ID NO: 42564 - RNA, 20 nt, Artificial Sequence
  RPE65 RNA guide
uugcgcuuaauucccaaaac

SEQ ID NO: 42565 - RNA, 20 nt, Artificial Sequence
  RPE65 RNA guide
uugggaauuaagcgcaacau

SEQ ID NO: 42566 - RNA, 20 nt, Artificial Sequence
  RPE65 RNA guide
uugggcauuaggccccuuau

SEQ ID NO: 42567 - RNA, 20 nt, Artificial Sequence
  RPE65 RNA guide
uuguaguuuugggaauuaag

SEQ ID NO: 42568 - RNA, 20 nt, Artificial Sequence
  RPE65 RNA guide
uugugagaaagauaagaaug

SEQ ID NO: 42569 - RNA, 20 nt, Artificial Sequence
  RPE65 RNA guide
uugugagaaaguuacuguau

SEQ ID NO: 42570 - RNA, 20 nt, Artificial Sequence
  RPE65 RNA guide
uuuaccaaucuguccucuuc

SEQ ID NO: 42571 - RNA, 20 nt, Artificial Sequence
  RPE65 RNA guide
uuuauugagcacuuauucau

SEQ ID NO: 42572 - RNA, 20 nt, Artificial Sequence
  RPE65 RNA guide
uuucaagucgucauccuuug

SEQ ID NO: 42573 - RNA, 20 nt, Artificial Sequence
  RPE65 RNA guide
uuucagaagaggacagauug

SEQ ID NO: 42574 - RNA, 20 nt, Artificial Sequence
  RPE65 RNA guide
uuugauaugaugcccuuggg

SEQ ID NO: 42575 - RNA, 20 nt, Artificial Sequence
  RPE65 RNA guide
uuugccuagcacaugaauaa

SEQ ID NO: 42576 - RNA, 20 nt, Artificial Sequence
  RPE65 RNA guide
uuugggaauuaagcgcaaca

SEQ ID NO: 42577 - RNA, 20 nt, Artificial Sequence
  RPE65 RNA guide
uuuguaguuuugggaauuaa

SEQ ID NO: 42578 - RNA, 20 nt, Artificial Sequence
  RPE65 RNA guide
uuuucaagucgucauccuuu

SEQ ID NO: 42579 - RNA, 20 nt, Artificial Sequence
  RPE65 RNA guide
uuuucagaagaggacagauu

SEQ ID NO: 42580 - RNA, 20 nt, Artificial Sequence
  RPE65 RNA guide
uuuugccuagcacaugaaua

SEQ ID NO: 42581 - RNA, 20 nt, Artificial Sequence
  RPE65 RNA guide
uuuugggaauuaagcgcaac

SEQ ID NO: 42582 - RNA, 21 nt, Artificial Sequence
  RPE65 RNA guide
aaaaagaacuacagcaaaaag

SEQ ID NO: 42583 - RNA, 21 nt, Artificial Sequence
  RPE65 RNA guide
aaaagaacuacagcaaaaaga

SEQ ID NO: 42584 - RNA, 21 nt, Artificial Sequence
  RPE65 RNA guide
aaaauauagaaagcaaguguc

SEQ ID NO: 42585 - RNA, 21 nt, Artificial Sequence
  RPE65 RNA guide
aaagaacuacagcaaaaagag

SEQ ID NO: 42586 - RNA, 21 nt, Artificial Sequence
  RPE65 RNA guide
aaagcaaguguccaaguucuc

SEQ ID NO: 42587 - RNA, 21 nt, Artificial Sequence
  RPE65 RNA guide
aaaggaugacgacuugaaaau

SEQ ID NO: 42588 - RNA, 21 nt, Artificial Sequence
  RPE65 RNA guide
aaauauagaaagcaagugucc

SEQ ID NO: 42589 - RNA, 21 nt, Artificial Sequence
  RPE65 RNA guide
aaauauguugcgcuuaauucc

SEQ ID NO: 42590 - RNA, 21 nt, Artificial Sequence
  RPE65 RNA guide
aaauuacucucagacuucaga

SEQ ID NO: 42591 - RNA, 21 nt, Artificial Sequence
  RPE65 RNA guide
aacagauuuguuuguaguuuu

SEQ ID NO: 42592 - RNA, 21 nt, Artificial Sequence
  RPE65 RNA guide
aacuacagcaaaaagagugua

SEQ ID NO: 42593 - RNA, 21 nt, Artificial Sequence
  RPE65 RNA guide
aacuaugcacaaaaugcuauu

SEQ ID NO: 42594 - RNA, 21 nt, Artificial Sequence
  RPE65 RNA guide
aacuuagcaaacauuuauuga

SEQ ID NO: 42595 - RNA, 21 nt, Artificial Sequence
  RPE65 RNA guide
aacuuggacacuugcuuucua

SEQ ID NO: 42596 - RNA, 21 nt, Artificial Sequence
  RPE65 RNA guide
aagaacuacagcaaaaagagu

SEQ ID NO: 42597 - RNA, 21 nt, Artificial Sequence
  RPE65 RNA guide
aagaaugucagaauagcauuu

SEQ ID NO: 42598 - RNA, 21 nt, Artificial Sequence
  RPE65 RNA guide
aagagaacuuggacacuugcu

SEQ ID NO: 42599 - RNA, 21 nt, Artificial Sequence
  RPE65 RNA guide
aagcaaguguccaaguucucu

SEQ ID NO: 42600 - RNA, 21 nt, Artificial Sequence
  RPE65 RNA guide
aagcauguaugugugcauaau

SEQ ID NO: 42601 - RNA, 21 nt, Artificial Sequence
  RPE65 RNA guide
aagcgcaacauauuuaguaca

SEQ ID NO: 42602 - RNA, 21 nt, Artificial Sequence
  RPE65 RNA guide
aaggaugacgacuugaaaaua

SEQ ID NO: 42603 - RNA, 21 nt, Artificial Sequence
  RPE65 RNA guide
aagggcaucauaucaaaggau

SEQ ID NO: 42604 - RNA, 21 nt, Artificial Sequence
  RPE65 RNA guide
aaggggccuaaugcccaaggg

SEQ ID NO: 42605 - RNA, 21 nt, Artificial Sequence
  RPE65 RNA guide
aaguacugcccucaucccuac

SEQ ID NO: 42606 - RNA, 21 nt, Artificial Sequence
  RPE65 RNA guide
aagucgucauccuuugauaug

SEQ ID NO: 42607 - RNA, 21 nt, Artificial Sequence
  RPE65 RNA guide
aagucugagaguaauuuaacu

SEQ ID NO: 42608 - RNA, 21 nt, Artificial Sequence
  RPE65 RNA guide
aagugcucaauaaauguuugc

SEQ ID NO: 42609 - RNA, 21 nt, Artificial Sequence
  RPE65 RNA guide
aaguguccaaguucucuucua

SEQ ID NO: 42610 - RNA, 21 nt, Artificial Sequence
  RPE65 RNA guide
aauauagaaagcaagugucca

SEQ ID NO: 42611 - RNA, 21 nt, Artificial Sequence
  RPE65 RNA guide
aauauguugcgcuuaauuccc

SEQ ID NO: 42612 - RNA, 21 nt, Artificial Sequence
  RPE65 RNA guide
aauauucuagaagagaacuug

SEQ ID NO: 42613 - RNA, 21 nt, Artificial Sequence
  RPE65 RNA guide
aaucuguccucuucugaaaau

SEQ ID NO: 42614 - RNA, 21 nt, Artificial Sequence
  RPE65 RNA guide
aaugcccaagggcaucauauc

SEQ ID NO: 42615 - RNA, 21 nt, Artificial Sequence
  RPE65 RNA guide
aaugucagaauagcauuuugu

SEQ ID NO: 42616 - RNA, 21 nt, Artificial Sequence
  RPE65 RNA guide
aauuacucucagacuucagaa

SEQ ID NO: 42617 - RNA, 21 nt, Artificial Sequence
  RPE65 RNA guide
aauucuaggguacacucuuuu

SEQ ID NO: 42618 - RNA, 21 nt, Artificial Sequence
  RPE65 RNA guide
aauuuugccuagcacaugaau

SEQ ID NO: 42619 - RNA, 21 nt, Artificial Sequence
  RPE65 RNA guide
acacucucauauauguaugua

SEQ ID NO: 42620 - RNA, 21 nt, Artificial Sequence
  RPE65 RNA guide
acacucuuuuugcuguaguuc

SEQ ID NO: 42621 - RNA, 21 nt, Artificial Sequence
  RPE65 RNA guide
acacuuauuuucagaagagga

SEQ ID NO: 42622 - RNA, 21 nt, Artificial Sequence
  RPE65 RNA guide
acagauuuguuuguaguuuug

SEQ ID NO: 42623 - RNA, 21 nt, Artificial Sequence
  RPE65 RNA guide
acagcaaaaagaguguacccu

SEQ ID NO: 42624 - RNA, 21 nt, Artificial Sequence
  RPE65 RNA guide
acaguaacuuucucacaauau

SEQ ID NO: 42625 - RNA, 21 nt, Artificial Sequence
  RPE65 RNA guide
accaaucuguccucuucugaa

SEQ ID NO: 42626 - RNA, 21 nt, Artificial Sequence
  RPE65 RNA guide
acccuauaaggggccuaaugc

SEQ ID NO: 42627 - RNA, 21 nt, Artificial Sequence
  RPE65 RNA guide
acgacuugaaaauauagaaag

SEQ ID NO: 42628 - RNA, 21 nt, Artificial Sequence
  RPE65 RNA guide
acuaaauauguugcgcuuaau

SEQ ID NO: 42629 - RNA, 21 nt, Artificial Sequence
  RPE65 RNA guide
acuacagcaaaaagaguguac

SEQ ID NO: 42630 - RNA, 21 nt, Artificial Sequence
  RPE65 RNA guide
acuaugcacaaaaugcuauuc

SEQ ID NO: 42631 - RNA, 21 nt, Artificial Sequence
  RPE65 RNA guide
acucucagacuucagaaguac

SEQ ID NO: 42632 - RNA, 21 nt, Artificial Sequence
  RPE65 RNA guide
acucuuuuugcuguaguucuu

SEQ ID NO: 42633 - RNA, 21 nt, Artificial Sequence
  RPE65 RNA guide
acugcccucaucccuacccua

SEQ ID NO: 42634 - RNA, 21 nt, Artificial Sequence
  RPE65 RNA guide
acuuagcaaacauuuauugag

SEQ ID NO: 42635 - RNA, 21 nt, Artificial Sequence
  RPE65 RNA guide
acuuauucaugugcuaggcaa

SEQ ID NO: 42636 - RNA, 21 nt, Artificial Sequence
  RPE65 RNA guide
acuuauuuucagaagaggaca

SEQ ID NO: 42637 - RNA, 21 nt, Artificial Sequence
  RPE65 RNA guide
acuucagaaguacugcccuca

SEQ ID NO: 42638 - RNA, 21 nt, Artificial Sequence
  RPE65 RNA guide
acuucugaagucugagaguaa

SEQ ID NO: 42639 - RNA, 21 nt, Artificial Sequence
  RPE65 RNA guide
acuugcuuucuauauuuucaa

SEQ ID NO: 42640 - RNA, 21 nt, Artificial Sequence
  RPE65 RNA guide
acuuggacacuugcuuucuau

SEQ ID NO: 42641 - RNA, 21 nt, Artificial Sequence
  RPE65 RNA guide
agaaaaagaacuacagcaaaa

SEQ ID NO: 42642 - RNA, 21 nt, Artificial Sequence
  RPE65 RNA guide
agaaagauaagaaugucagaa

SEQ ID NO: 42643 - RNA, 21 nt, Artificial Sequence
  RPE65 RNA guide
agaaagcaaguguccaaguuc

SEQ ID NO: 42644 - RNA, 21 nt, Artificial Sequence
  RPE65 RNA guide
agaaaguuacuguauugugag

SEQ ID NO: 42645 - RNA, 21 nt, Artificial Sequence
  RPE65 RNA guide
agaacuacagcaaaaagagug

SEQ ID NO: 42646 - RNA, 21 nt, Artificial Sequence
  RPE65 RNA guide
agaacuuggacacuugcuuuc

SEQ ID NO: 42647 - RNA, 21 nt, Artificial Sequence
  RPE65 RNA guide
agaagagaacuuggacacuug

SEQ ID NO: 42648 - RNA, 21 nt, Artificial Sequence
  RPE65 RNA guide
agaagaggacagauugguaaa

SEQ ID NO: 42649 - RNA, 21 nt, Artificial Sequence
  RPE65 RNA guide
agaaguacugcccucaucccu

SEQ ID NO: 42650 - RNA, 21 nt, Artificial Sequence
  RPE65 RNA guide
agaaugucagaauagcauuuu

SEQ ID NO: 42651 - RNA, 21 nt, Artificial Sequence
  RPE65 RNA guide
agacacuuauuuucagaagag

SEQ ID NO: 42652 - RNA, 21 nt, Artificial Sequence
  RPE65 RNA guide
agacuucagaaguacugcccu

SEQ ID NO: 42653 - RNA, 21 nt, Artificial Sequence
  RPE65 RNA guide
agagaacuuggacacuugcuu

SEQ ID NO: 42654 - RNA, 21 nt, Artificial Sequence
  RPE65 RNA guide
agaguguacuaaauauguugc

SEQ ID NO: 42655 - RNA, 21 nt, Artificial Sequence
  RPE65 RNA guide
agcaaaaagaguguacccuag

SEQ ID NO: 42656 - RNA, 21 nt, Artificial Sequence
  RPE65 RNA guide
agcaaguguccaaguucucuu

SEQ ID NO: 42657 - RNA, 21 nt, Artificial Sequence
  RPE65 RNA guide
agcacaugaauaagugcucaa

SEQ ID NO: 42658 - RNA, 21 nt, Artificial Sequence
  RPE65 RNA guide
agcacuuauucaugugcuagg

SEQ ID NO: 42659 - RNA, 21 nt, Artificial Sequence
  RPE65 RNA guide
agcauacauacauauaugaga

SEQ ID NO: 42660 - RNA, 21 nt, Artificial Sequence
  RPE65 RNA guide
agcauguaugugugcauaaua

SEQ ID NO: 42661 - RNA, 21 nt, Artificial Sequence
  RPE65 RNA guide
agcgcaacauauuuaguacac

SEQ ID NO: 42662 - RNA, 21 nt, Artificial Sequence
  RPE65 RNA guide
aggaugacgacuugaaaauau

SEQ ID NO: 42663 - RNA, 21 nt, Artificial Sequence
  RPE65 RNA guide
aggccccuuauaggguaggga

SEQ ID NO: 42664 - RNA, 21 nt, Artificial Sequence
  RPE65 RNA guide
agggaugagggcaguacuucu

SEQ ID NO: 42665 - RNA, 21 nt, Artificial Sequence
  RPE65 RNA guide
agggcaguacuucugaagucu

SEQ ID NO: 42666 - RNA, 21 nt, Artificial Sequence
  RPE65 RNA guide
agggcaucauaucaaaggaug

SEQ ID NO: 42667 - RNA, 21 nt, Artificial Sequence
  RPE65 RNA guide
aggggccuaaugcccaagggc

SEQ ID NO: 42668 - RNA, 21 nt, Artificial Sequence
  RPE65 RNA guide
aggguacacucuuuuugcugu

SEQ ID NO: 42669 - RNA, 21 nt, Artificial Sequence
  RPE65 RNA guide
aggguagggaugagggcagua

SEQ ID NO: 42670 - RNA, 21 nt, Artificial Sequence
  RPE65 RNA guide
aguaacuuucucacaauauag

SEQ ID NO: 42671 - RNA, 21 nt, Artificial Sequence
  RPE65 RNA guide
aguacuauagaaaaagaacua

SEQ ID NO: 42672 - RNA, 21 nt, Artificial Sequence
  RPE65 RNA guide
aguacugcccucaucccuacc

SEQ ID NO: 42673 - RNA, 21 nt, Artificial Sequence
  RPE65 RNA guide
aguacuucugaagucugagag

SEQ ID NO: 42674 - RNA, 21 nt, Artificial Sequence
  RPE65 RNA guide
agucgucauccuuugauauga

SEQ ID NO: 42675 - RNA, 21 nt, Artificial Sequence
  RPE65 RNA guide
agucugagaguaauuuaacua

SEQ ID NO: 42676 - RNA, 21 nt, Artificial Sequence
  RPE65 RNA guide
agugcucaauaaauguuugcu

SEQ ID NO: 42677 - RNA, 21 nt, Artificial Sequence
  RPE65 RNA guide
aguguacuaaauauguugcgc

SEQ ID NO: 42678 - RNA, 21 nt, Artificial Sequence
  RPE65 RNA guide
aguguccaaguucucuucuag

SEQ ID NO: 42679 - RNA, 21 nt, Artificial Sequence
  RPE65 RNA guide
agugucuauauugugagaaag

SEQ ID NO: 42680 - RNA, 21 nt, Artificial Sequence
  RPE65 RNA guide
aguuaaauuacucucagacuu

SEQ ID NO: 42681 - RNA, 21 nt, Artificial Sequence
  RPE65 RNA guide
aguuuaccaaucuguccucuu

SEQ ID NO: 42682 - RNA, 21 nt, Artificial Sequence
  RPE65 RNA guide
aguuuugggaauuaagcgcaa

SEQ ID NO: 42683 - RNA, 21 nt, Artificial Sequence
  RPE65 RNA guide
auaagcauguaugugugcaua

SEQ ID NO: 42684 - RNA, 21 nt, Artificial Sequence
  RPE65 RNA guide
auaaggggccuaaugcccaag

SEQ ID NO: 42685 - RNA, 21 nt, Artificial Sequence
  RPE65 RNA guide
auagaaagcaaguguccaagu

SEQ ID NO: 42686 - RNA, 21 nt, Artificial Sequence
  RPE65 RNA guide
auagacacuuauuuucagaag

SEQ ID NO: 42687 - RNA, 21 nt, Artificial Sequence
  RPE65 RNA guide
auaggguagggaugagggcag

SEQ ID NO: 42688 - RNA, 21 nt, Artificial Sequence
  RPE65 RNA guide
auauagaaagcaaguguccaa

SEQ ID NO: 42689 - RNA, 21 nt, Artificial Sequence
  RPE65 RNA guide
auaucaaaggaugacgacuug

SEQ ID NO: 42690 - RNA, 21 nt, Artificial Sequence
  RPE65 RNA guide
auaugaugcccuugggcauua

SEQ ID NO: 42691 - RNA, 21 nt, Artificial Sequence
  RPE65 RNA guide
auauguugcgcuuaauuccca

SEQ ID NO: 42692 - RNA, 21 nt, Artificial Sequence
  RPE65 RNA guide
auauucuagaagagaacuugg

SEQ ID NO: 42693 - RNA, 21 nt, Artificial Sequence
  RPE65 RNA guide
auauuuucaagucgucauccu

SEQ ID NO: 42694 - RNA, 21 nt, Artificial Sequence
  RPE65 RNA guide
aucaaaggaugacgacuugaa

SEQ ID NO: 42695 - RNA, 21 nt, Artificial Sequence
  RPE65 RNA guide
aucauaucaaaggaugacgac

SEQ ID NO: 42696 - RNA, 21 nt, Artificial Sequence
  RPE65 RNA guide
aucccuacccuauaaggggcc

SEQ ID NO: 42697 - RNA, 21 nt, Artificial Sequence
  RPE65 RNA guide
auccuuugauaugaugcccuu

SEQ ID NO: 42698 - RNA, 21 nt, Artificial Sequence
  RPE65 RNA guide
aucuguccucuucugaaaaua

SEQ ID NO: 42699 - RNA, 21 nt, Artificial Sequence
  RPE65 RNA guide
augacgacuugaaaauauaga

SEQ ID NO: 42700 - RNA, 21 nt, Artificial Sequence
  RPE65 RNA guide
augagaguguacuaaauaugu

SEQ ID NO: 42701 - RNA, 21 nt, Artificial Sequence
  RPE65 RNA guide
augagggcaguacuucugaag

SEQ ID NO: 42702 - RNA, 21 nt, Artificial Sequence
  RPE65 RNA guide
augaugcccuugggcauuagg

SEQ ID NO: 42703 - RNA, 21 nt, Artificial Sequence
  RPE65 RNA guide
augcacaaaaugcuauucuga

SEQ ID NO: 42704 - RNA, 21 nt, Artificial Sequence
  RPE65 RNA guide
augcccaagggcaucauauca

SEQ ID NO: 42705 - RNA, 21 nt, Artificial Sequence
  RPE65 RNA guide
augcccuugggcauuaggccc

SEQ ID NO: 42706 - RNA, 21 nt, Artificial Sequence
  RPE65 RNA guide
augcuauuaugcacacauaca

SEQ ID NO: 42707 - RNA, 21 nt, Artificial Sequence
  RPE65 RNA guide
auguaugcuauuaugcacaca

SEQ ID NO: 42708 - RNA, 21 nt, Artificial Sequence
  RPE65 RNA guide
auguauguaugcuauuaugca

SEQ ID NO: 42709 - RNA, 21 nt, Artificial Sequence
  RPE65 RNA guide
auguaugugugcauaauagca

SEQ ID NO: 42710 - RNA, 21 nt, Artificial Sequence
  RPE65 RNA guide
augucagaauagcauuuugug

SEQ ID NO: 42711 - RNA, 21 nt, Artificial Sequence
  RPE65 RNA guide
augugugcauaauagcauaca

SEQ ID NO: 42712 - RNA, 21 nt, Artificial Sequence
  RPE65 RNA guide
auguugcgcuuaauucccaaa

SEQ ID NO: 42713 - RNA, 21 nt, Artificial Sequence
  RPE65 RNA guide
auuaagcgcaacauauuuagu

SEQ ID NO: 42714 - RNA, 21 nt, Artificial Sequence
  RPE65 RNA guide
auuacucucagacuucagaag

SEQ ID NO: 42715 - RNA, 21 nt, Artificial Sequence
  RPE65 RNA guide
auuaggccccuuauaggguag

SEQ ID NO: 42716 - RNA, 21 nt, Artificial Sequence
  RPE65 RNA guide
auucccaaaacuacaaacaaa

SEQ ID NO: 42717 - RNA, 21 nt, Artificial Sequence
  RPE65 RNA guide
auucuagaagagaacuuggac

SEQ ID NO: 42718 - RNA, 21 nt, Artificial Sequence
  RPE65 RNA guide
auucuaggguacacucuuuuu

SEQ ID NO: 42719 - RNA, 21 nt, Artificial Sequence
  RPE65 RNA guide
auucugacauucuuaucuuuc

SEQ ID NO: 42720 - RNA, 21 nt, Artificial Sequence
  RPE65 RNA guide
auugagcacuuauucaugugc

SEQ ID NO: 42721 - RNA, 21 nt, Artificial Sequence
  RPE65 RNA guide
auugugagaaagauaagaaug

SEQ ID NO: 42722 - RNA, 21 nt, Artificial Sequence
  RPE65 RNA guide
auugugagaaaguuacuguau

SEQ ID NO: 42723 - RNA, 21 nt, Artificial Sequence
  RPE65 RNA guide
auuuauugagcacuuauucau

SEQ ID NO: 42724 - RNA, 21 nt, Artificial Sequence
  RPE65 RNA guide
auuuucaagucgucauccuuu

SEQ ID NO: 42725 - RNA, 21 nt, Artificial Sequence
  RPE65 RNA guide
auuuucagaagaggacagauu

SEQ ID NO: 42726 - RNA, 21 nt, Artificial Sequence
  RPE65 RNA guide
auuuugccuagcacaugaaua

SEQ ID NO: 42727 - RNA, 21 nt, Artificial Sequence
  RPE65 RNA guide
caaacuuagcaaacauuuauu

SEQ ID NO: 42728 - RNA, 21 nt, Artificial Sequence
  RPE65 RNA guide
caaaggaugacgacuugaaaa

SEQ ID NO: 42729 - RNA, 21 nt, Artificial Sequence
  RPE65 RNA guide
caaaucuguuaucucauagaa

SEQ ID NO: 42730 - RNA, 21 nt, Artificial Sequence
  RPE65 RNA guide
caagggcaucauaucaaagga

SEQ ID NO: 42731 - RNA, 21 nt, Artificial Sequence
  RPE65 RNA guide
caagucgucauccuuugauau

SEQ ID NO: 42732 - RNA, 21 nt, Artificial Sequence
  RPE65 RNA guide
caaguguccaaguucucuucu

SEQ ID NO: 42733 - RNA, 21 nt, Artificial Sequence
  RPE65 RNA guide
caaucuguccucuucugaaaa

SEQ ID NO: 42734 - RNA, 21 nt, Artificial Sequence
  RPE65 RNA guide
caauuaggauucaaacuuagc

SEQ ID NO: 42735 - RNA, 21 nt, Artificial Sequence
  RPE65 RNA guide
cacaaaaugcuauucugacau

SEQ ID NO: 42736 - RNA, 21 nt, Artificial Sequence
  RPE65 RNA guide
cacaauacaguaacuuucuca

SEQ ID NO: 42737 - RNA, 21 nt, Artificial Sequence
  RPE65 RNA guide
cacaugaauaagugcucaaua

SEQ ID NO: 42738 - RNA, 21 nt, Artificial Sequence
  RPE65 RNA guide
cacucucauauauguauguau

SEQ ID NO: 42739 - RNA, 21 nt, Artificial Sequence
  RPE65 RNA guide
cacucuuuuugcuguaguucu

SEQ ID NO: 42740 - RNA, 21 nt, Artificial Sequence
  RPE65 RNA guide
cacuuauucaugugcuaggca

SEQ ID NO: 42741 - RNA, 21 nt, Artificial Sequence
  RPE65 RNA guide
cacuuauuuucagaagaggac

SEQ ID NO: 42742 - RNA, 21 nt, Artificial Sequence
  RPE65 RNA guide
cacuugcuuucuauauuuuca

SEQ ID NO: 42743 - RNA, 21 nt, Artificial Sequence
  RPE65 RNA guide
cagaagaggacagauugguaa

SEQ ID NO: 42744 - RNA, 21 nt, Artificial Sequence
  RPE65 RNA guide
cagaaguacugcccucauccc

SEQ ID NO: 42745 - RNA, 21 nt, Artificial Sequence
  RPE65 RNA guide
cagaauagcauuuugugcaua

SEQ ID NO: 42746 - RNA, 21 nt, Artificial Sequence
  RPE65 RNA guide
cagacuucagaaguacugccc

SEQ ID NO: 42747 - RNA, 21 nt, Artificial Sequence
  RPE65 RNA guide
cagauuuguuuguaguuuugg

SEQ ID NO: 42748 - RNA, 21 nt, Artificial Sequence
  RPE65 RNA guide
cagcaaaaagaguguacccua

SEQ ID NO: 42749 - RNA, 21 nt, Artificial Sequence
  RPE65 RNA guide
caguaacuuucucacaauaua

SEQ ID NO: 42750 - RNA, 21 nt, Artificial Sequence
  RPE65 RNA guide
caguacuucugaagucugaga

SEQ ID NO: 42751 - RNA, 21 nt, Artificial Sequence
  RPE65 RNA guide
cauacauacauauaugagagu

SEQ ID NO: 42752 - RNA, 21 nt, Artificial Sequence
  RPE65 RNA guide
cauaguuaaauuacucucaga

SEQ ID NO: 42753 - RNA, 21 nt, Artificial Sequence
  RPE65 RNA guide
cauaucaaaggaugacgacuu

SEQ ID NO: 42754 - RNA, 21 nt, Artificial Sequence
  RPE65 RNA guide
caucauaucaaaggaugacga

SEQ ID NO: 42755 - RNA, 21 nt, Artificial Sequence
  RPE65 RNA guide
caucccuacccuauaaggggc

SEQ ID NO: 42756 - RNA, 21 nt, Artificial Sequence
  RPE65 RNA guide
cauccuuugauaugaugcccu

SEQ ID NO: 42757 - RNA, 21 nt, Artificial Sequence
  RPE65 RNA guide
cauguaugugugcauaauagc

SEQ ID NO: 42758 - RNA, 21 nt, Artificial Sequence
  RPE65 RNA guide
cauuaggccccuuauagggua

SEQ ID NO: 42759 - RNA, 21 nt, Artificial Sequence
  RPE65 RNA guide
cauucuuaucuuucucacaau

SEQ ID NO: 42760 - RNA, 21 nt, Artificial Sequence
  RPE65 RNA guide
cauuuauugagcacuuauuca

SEQ ID NO: 42761 - RNA, 21 nt, Artificial Sequence
  RPE65 RNA guide
ccaagggcaucauaucaaagg

SEQ ID NO: 42762 - RNA, 21 nt, Artificial Sequence
  RPE65 RNA guide
ccaaucuguccucuucugaaa

SEQ ID NO: 42763 - RNA, 21 nt, Artificial Sequence
  RPE65 RNA guide
cccaaaacuacaaacaaaucu

SEQ ID NO: 42764 - RNA, 21 nt, Artificial Sequence
  RPE65 RNA guide
cccaagggcaucauaucaaag

SEQ ID NO: 42765 - RNA, 21 nt, Artificial Sequence
  RPE65 RNA guide
ccccuuauaggguagggauga

SEQ ID NO: 42766 - RNA, 21 nt, Artificial Sequence
  RPE65 RNA guide
cccuacccuauaaggggccua

SEQ ID NO: 42767 - RNA, 21 nt, Artificial Sequence
  RPE65 RNA guide
cccuauaaggggccuaaugcc

SEQ ID NO: 42768 - RNA, 21 nt, Artificial Sequence
  RPE65 RNA guide
cccucaucccuacccuauaag

SEQ ID NO: 42769 - RNA, 21 nt, Artificial Sequence
  RPE65 RNA guide
cccuuauaggguagggaugag

SEQ ID NO: 42770 - RNA, 21 nt, Artificial Sequence
  RPE65 RNA guide
cccuugggcauuaggccccuu

SEQ ID NO: 42771 - RNA, 21 nt, Artificial Sequence
  RPE65 RNA guide
ccuaaugcccaagggcaucau

SEQ ID NO: 42772 - RNA, 21 nt, Artificial Sequence
  RPE65 RNA guide
ccuacccuauaaggggccuaa

SEQ ID NO: 42773 - RNA, 21 nt, Artificial Sequence
  RPE65 RNA guide
ccuagcacaugaauaagugcu

SEQ ID NO: 42774 - RNA, 21 nt, Artificial Sequence
  RPE65 RNA guide
ccuauaaggggccuaaugccc

SEQ ID NO: 42775 - RNA, 21 nt, Artificial Sequence
  RPE65 RNA guide
ccucaucccuacccuauaagg

SEQ ID NO: 42776 - RNA, 21 nt, Artificial Sequence
  RPE65 RNA guide
ccucuucugaaaauaaguguc

SEQ ID NO: 42777 - RNA, 21 nt, Artificial Sequence
  RPE65 RNA guide
ccuuauaggguagggaugagg

SEQ ID NO: 42778 - RNA, 21 nt, Artificial Sequence
  RPE65 RNA guide
ccuugggcauuaggccccuua

SEQ ID NO: 42779 - RNA, 21 nt, Artificial Sequence
  RPE65 RNA guide
ccuuugauaugaugcccuugg

SEQ ID NO: 42780 - RNA, 21 nt, Artificial Sequence
  RPE65 RNA guide
cgacuugaaaauauagaaagc

SEQ ID NO: 42781 - RNA, 21 nt, Artificial Sequence
  RPE65 RNA guide
cgcaacauauuuaguacacuc

SEQ ID NO: 42782 - RNA, 21 nt, Artificial Sequence
  RPE65 RNA guide
cgcuuaauucccaaaacuaca

SEQ ID NO: 42783 - RNA, 21 nt, Artificial Sequence
  RPE65 RNA guide
cgucauccuuugauaugaugc

SEQ ID NO: 42784 - RNA, 21 nt, Artificial Sequence
  RPE65 RNA guide
cuaaauauguugcgcuuaauu

SEQ ID NO: 42785 - RNA, 21 nt, Artificial Sequence
  RPE65 RNA guide
cuaaugcccaagggcaucaua

SEQ ID NO: 42786 - RNA, 21 nt, Artificial Sequence
  RPE65 RNA guide
cuacagcaaaaagaguguacc

SEQ ID NO: 42787 - RNA, 21 nt, Artificial Sequence
  RPE65 RNA guide
cuacccuauaaggggccuaau

SEQ ID NO: 42788 - RNA, 21 nt, Artificial Sequence
  RPE65 RNA guide
cuagaagagaacuuggacacu

SEQ ID NO: 42789 - RNA, 21 nt, Artificial Sequence
  RPE65 RNA guide
cuagcacaugaauaagugcuc

SEQ ID NO: 42790 - RNA, 21 nt, Artificial Sequence
  RPE65 RNA guide
cuaggguacacucuuuuugcu

SEQ ID NO: 42791 - RNA, 21 nt, Artificial Sequence
  RPE65 RNA guide
cuauaaggggccuaaugccca

SEQ ID NO: 42792 - RNA, 21 nt, Artificial Sequence
  RPE65 RNA guide
cuauaguacuucuaugagaua

SEQ ID NO: 42793 - RNA, 21 nt, Artificial Sequence
  RPE65 RNA guide
cuauauuuucaagucgucauc

SEQ ID NO: 42794 - RNA, 21 nt, Artificial Sequence
  RPE65 RNA guide
cuaugcacaaaaugcuauucu

SEQ ID NO: 42795 - RNA, 21 nt, Artificial Sequence
  RPE65 RNA guide
cuauuaugcacacauacaugc

SEQ ID NO: 42796 - RNA, 21 nt, Artificial Sequence
  RPE65 RNA guide
cuauucugacauucuuaucuu

SEQ ID NO: 42797 - RNA, 21 nt, Artificial Sequence
  RPE65 RNA guide
cucacaauacaguaacuuucu

SEQ ID NO: 42798 - RNA, 21 nt, Artificial Sequence
  RPE65 RNA guide
cucagacuucagaaguacugc

SEQ ID NO: 42799 - RNA, 21 nt, Artificial Sequence
  RPE65 RNA guide
cucaucccuacccuauaaggg

SEQ ID NO: 42800 - RNA, 21 nt, Artificial Sequence
  RPE65 RNA guide
cucucagacuucagaaguacu

SEQ ID NO: 42801 - RNA, 21 nt, Artificial Sequence
  RPE65 RNA guide
cucuuuuugcuguaguucuuu

SEQ ID NO: 42802 - RNA, 21 nt, Artificial Sequence
  RPE65 RNA guide
cugaagucugagaguaauuua

SEQ ID NO: 42803 - RNA, 21 nt, Artificial Sequence
  RPE65 RNA guide
cugacauucuuaucuuucuca

SEQ ID NO: 42804 - RNA, 21 nt, Artificial Sequence
  RPE65 RNA guide
cugagaguaauuuaacuaugc

SEQ ID NO: 42805 - RNA, 21 nt, Artificial Sequence
  RPE65 RNA guide
cugcccucaucccuacccuau

SEQ ID NO: 42806 - RNA, 21 nt, Artificial Sequence
  RPE65 RNA guide
cuguauugugagaaagauaag

SEQ ID NO: 42807 - RNA, 21 nt, Artificial Sequence
  RPE65 RNA guide
cuguccucuucugaaaauaag

SEQ ID NO: 42808 - RNA, 21 nt, Artificial Sequence
  RPE65 RNA guide
cuuagcaaacauuuauugagc

SEQ ID NO: 42809 - RNA, 21 nt, Artificial Sequence
  RPE65 RNA guide
cuuauaggguagggaugaggg

SEQ ID NO: 42810 - RNA, 21 nt, Artificial Sequence
  RPE65 RNA guide
cuuaucuuucucacaauacag

SEQ ID NO: 42811 - RNA, 21 nt, Artificial Sequence
  RPE65 RNA guide
cuuauucaugugcuaggcaaa

SEQ ID NO: 42812 - RNA, 21 nt, Artificial Sequence
  RPE65 RNA guide
cuuauuuucagaagaggacag

SEQ ID NO: 42813 - RNA, 21 nt, Artificial Sequence
  RPE65 RNA guide
cuucagaaguacugcccucau

SEQ ID NO: 42814 - RNA, 21 nt, Artificial Sequence
  RPE65 RNA guide
cuucugaagucugagaguaau

SEQ ID NO: 42815 - RNA, 21 nt, Artificial Sequence
  RPE65 RNA guide
cuugaaaauauagaaagcaag

SEQ ID NO: 42816 - RNA, 21 nt, Artificial Sequence
  RPE65 RNA guide
cuugcuuucuauauuuucaag

SEQ ID NO: 42817 - RNA, 21 nt, Artificial Sequence
  RPE65 RNA guide
cuuggacacuugcuuucuaua

SEQ ID NO: 42818 - RNA, 21 nt, Artificial Sequence
  RPE65 RNA guide
cuugggcauuaggccccuuau

SEQ ID NO: 42819 - RNA, 21 nt, Artificial Sequence
  RPE65 RNA guide
cuuucuauauuuucaagucgu

SEQ ID NO: 42820 - RNA, 21 nt, Artificial Sequence
  RPE65 RNA guide
cuuucucacaauacaguaacu

SEQ ID NO: 42821 - RNA, 21 nt, Artificial Sequence
  RPE65 RNA guide
cuuugauaugaugcccuuggg

SEQ ID NO: 42822 - RNA, 21 nt, Artificial Sequence
  RPE65 RNA guide
gaaaaagaacuacagcaaaaa

SEQ ID NO: 42823 - RNA, 21 nt, Artificial Sequence
  RPE65 RNA guide
gaaaauauagaaagcaagugu

SEQ ID NO: 42824 - RNA, 21 nt, Artificial Sequence
  RPE65 RNA guide
gaaagauaagaaugucagaau

SEQ ID NO: 42825 - RNA, 21 nt, Artificial Sequence
  RPE65 RNA guide
gaaagcaaguguccaaguucu

SEQ ID NO: 42826 - RNA, 21 nt, Artificial Sequence
  RPE65 RNA guide
gaaaguuacuguauugugaga

SEQ ID NO: 42827 - RNA, 21 nt, Artificial Sequence
  RPE65 RNA guide
gaacuacagcaaaaagagugu

SEQ ID NO: 42828 - RNA, 21 nt, Artificial Sequence
  RPE65 RNA guide
gaacuuggacacuugcuuucu

SEQ ID NO: 42829 - RNA, 21 nt, Artificial Sequence
  RPE65 RNA guide
gaagagaacuuggacacuugc

SEQ ID NO: 42830 - RNA, 21 nt, Artificial Sequence
  RPE65 RNA guide
gaagaggacagauugguaaac

SEQ ID NO: 42831 - RNA, 21 nt, Artificial Sequence
  RPE65 RNA guide
gaaguacugcccucaucccua

SEQ ID NO: 42832 - RNA, 21 nt, Artificial Sequence
  RPE65 RNA guide
gaagucugagaguaauuuaac

SEQ ID NO: 42833 - RNA, 21 nt, Artificial Sequence
  RPE65 RNA guide
gaauaagugcucaauaaaugu

SEQ ID NO: 42834 - RNA, 21 nt, Artificial Sequence
  RPE65 RNA guide
gaaugucagaauagcauuuug

SEQ ID NO: 42835 - RNA, 21 nt, Artificial Sequence
  RPE65 RNA guide
gaauuaagcgcaacauauuua

SEQ ID NO: 42836 - RNA, 21 nt, Artificial Sequence
  RPE65 RNA guide
gacacuuauuuucagaagagg

SEQ ID NO: 42837 - RNA, 21 nt, Artificial Sequence
  RPE65 RNA guide
gacacuugcuuucuauauuuu

SEQ ID NO: 42838 - RNA, 21 nt, Artificial Sequence
  RPE65 RNA guide
gacauucuuaucuuucucaca

SEQ ID NO: 42839 - RNA, 21 nt, Artificial Sequence
  RPE65 RNA guide
gacgacuugaaaauauagaaa

SEQ ID NO: 42840 - RNA, 21 nt, Artificial Sequence
  RPE65 RNA guide
gacuucagaaguacugcccuc

SEQ ID NO: 42841 - RNA, 21 nt, Artificial Sequence
  RPE65 RNA guide
gacuugaaaauauagaaagca

SEQ ID NO: 42842 - RNA, 21 nt, Artificial Sequence
  RPE65 RNA guide
gagaaagauaagaaugucaga

SEQ ID NO: 42843 - RNA, 21 nt, Artificial Sequence
  RPE65 RNA guide
gagaaaguuacuguauuguga

SEQ ID NO: 42844 - RNA, 21 nt, Artificial Sequence
  RPE65 RNA guide
gagaacuuggacacuugcuuu

SEQ ID NO: 42845 - RNA, 21 nt, Artificial Sequence
  RPE65 RNA guide
gagaguguacuaaauauguug

SEQ ID NO: 42846 - RNA, 21 nt, Artificial Sequence
  RPE65 RNA guide
gagcacuuauucaugugcuag

SEQ ID NO: 42847 - RNA, 21 nt, Artificial Sequence
  RPE65 RNA guide
gagggcaguacuucugaaguc

SEQ ID NO: 42848 - RNA, 21 nt, Artificial Sequence
  RPE65 RNA guide
gaguguacuaaauauguugcg

SEQ ID NO: 42849 - RNA, 21 nt, Artificial Sequence
  RPE65 RNA guide
gaguuuaccaaucuguccucu

SEQ ID NO: 42850 - RNA, 21 nt, Artificial Sequence
  RPE65 RNA guide
gauaugaugcccuugggcauu

SEQ ID NO: 42851 - RNA, 21 nt, Artificial Sequence
  RPE65 RNA guide
gaugacgacuugaaaauauag

SEQ ID NO: 42852 - RNA, 21 nt, Artificial Sequence
  RPE65 RNA guide
gaugagggcaguacuucugaa

SEQ ID NO: 42853 - RNA, 21 nt, Artificial Sequence
  RPE65 RNA guide
gaugcccuugggcauuaggcc

SEQ ID NO: 42854 - RNA, 21 nt, Artificial Sequence
  RPE65 RNA guide
gcaaacauuuauugagcacuu

SEQ ID NO: 42855 - RNA, 21 nt, Artificial Sequence
  RPE65 RNA guide
gcaacauauuuaguacacucu

SEQ ID NO: 42856 - RNA, 21 nt, Artificial Sequence
  RPE65 RNA guide
gcaaguguccaaguucucuuc

SEQ ID NO: 42857 - RNA, 21 nt, Artificial Sequence
  RPE65 RNA guide
gcacaaaaugcuauucugaca

SEQ ID NO: 42858 - RNA, 21 nt, Artificial Sequence
  RPE65 RNA guide
gcacaugaauaagugcucaau

SEQ ID NO: 42859 - RNA, 21 nt, Artificial Sequence
  RPE65 RNA guide
gcacuuauucaugugcuaggc

SEQ ID NO: 42860 - RNA, 21 nt, Artificial Sequence
  RPE65 RNA guide
gcaguacuucugaagucugag

SEQ ID NO: 42861 - RNA, 21 nt, Artificial Sequence
  RPE65 RNA guide
gcauacauacauauaugagag

SEQ ID NO: 42862 - RNA, 21 nt, Artificial Sequence
  RPE65 RNA guide
gcauaguuaaauuacucucag

SEQ ID NO: 42863 - RNA, 21 nt, Artificial Sequence
  RPE65 RNA guide
gcaucauaucaaaggaugacg

SEQ ID NO: 42864 - RNA, 21 nt, Artificial Sequence
  RPE65 RNA guide
gcauguaugugugcauaauag

SEQ ID NO: 42865 - RNA, 21 nt, Artificial Sequence
  RPE65 RNA guide
gcauuaggccccuuauagggu

SEQ ID NO: 42866 - RNA, 21 nt, Artificial Sequence
  RPE65 RNA guide
gcccaagggcaucauaucaaa

SEQ ID NO: 42867 - RNA, 21 nt, Artificial Sequence
  RPE65 RNA guide
gccccuuauaggguagggaug

SEQ ID NO: 42868 - RNA, 21 nt, Artificial Sequence
  RPE65 RNA guide
gcccucaucccuacccuauaa

SEQ ID NO: 42869 - RNA, 21 nt, Artificial Sequence
  RPE65 RNA guide
gcccuugggcauuaggccccu

SEQ ID NO: 42870 - RNA, 21 nt, Artificial Sequence
  RPE65 RNA guide
gccuaaugcccaagggcauca

SEQ ID NO: 42871 - RNA, 21 nt, Artificial Sequence
  RPE65 RNA guide
gccuagcacaugaauaagugc

SEQ ID NO: 42872 - RNA, 21 nt, Artificial Sequence
  RPE65 RNA guide
gcgcaacauauuuaguacacu

SEQ ID NO: 42873 - RNA, 21 nt, Artificial Sequence
  RPE65 RNA guide
gcgcuuaauucccaaaacuac

SEQ ID NO: 42874 - RNA, 21 nt, Artificial Sequence
  RPE65 RNA guide
gcuauuaugcacacauacaug

SEQ ID NO: 42875 - RNA, 21 nt, Artificial Sequence
  RPE65 RNA guide
gcuauucugacauucuuaucu

SEQ ID NO: 42876 - RNA, 21 nt, Artificial Sequence
  RPE65 RNA guide
gcucaauaaauguuugcuaag

SEQ ID NO: 42877 - RNA, 21 nt, Artificial Sequence
  RPE65 RNA guide
gcuguaguucuuuuucuauag

SEQ ID NO: 42878 - RNA, 21 nt, Artificial Sequence
  RPE65 RNA guide
gcuuaauucccaaaacuacaa

SEQ ID NO: 42879 - RNA, 21 nt, Artificial Sequence
  RPE65 RNA guide
gcuuucuauauuuucaagucg

SEQ ID NO: 42880 - RNA, 21 nt, Artificial Sequence
  RPE65 RNA guide
ggaauuaagcgcaacauauuu

SEQ ID NO: 42881 - RNA, 21 nt, Artificial Sequence
  RPE65 RNA guide
ggacacuugcuuucuauauuu

SEQ ID NO: 42882 - RNA, 21 nt, Artificial Sequence
  RPE65 RNA guide
ggaugacgacuugaaaauaua

SEQ ID NO: 42883 - RNA, 21 nt, Artificial Sequence
  RPE65 RNA guide
ggaugagggcaguacuucuga

SEQ ID NO: 42884 - RNA, 21 nt, Artificial Sequence
  RPE65 RNA guide
ggcaguacuucugaagucuga

SEQ ID NO: 42885 - RNA, 21 nt, Artificial Sequence
  RPE65 RNA guide
ggcaucauaucaaaggaugac

SEQ ID NO: 42886 - RNA, 21 nt, Artificial Sequence
  RPE65 RNA guide
ggcauuaggccccuuauaggg

SEQ ID NO: 42887 - RNA, 21 nt, Artificial Sequence
  RPE65 RNA guide
ggccccuuauaggguagggau

SEQ ID NO: 42888 - RNA, 21 nt, Artificial Sequence
  RPE65 RNA guide
ggccuaaugcccaagggcauc

SEQ ID NO: 42889 - RNA, 21 nt, Artificial Sequence
  RPE65 RNA guide
gggaauuaagcgcaacauauu

SEQ ID NO: 42890 - RNA, 21 nt, Artificial Sequence
  RPE65 RNA guide
gggaugagggcaguacuucug

SEQ ID NO: 42891 - RNA, 21 nt, Artificial Sequence
  RPE65 RNA guide
gggcaguacuucugaagucug

SEQ ID NO: 42892 - RNA, 21 nt, Artificial Sequence
  RPE65 RNA guide
gggcaucauaucaaaggauga

SEQ ID NO: 42893 - RNA, 21 nt, Artificial Sequence
  RPE65 RNA guide
gggcauuaggccccuuauagg

SEQ ID NO: 42894 - RNA, 21 nt, Artificial Sequence
  RPE65 RNA guide
gggccuaaugcccaagggcau

SEQ ID NO: 42895 - RNA, 21 nt, Artificial Sequence
  RPE65 RNA guide
ggggccuaaugcccaagggca

SEQ ID NO: 42896 - RNA, 21 nt, Artificial Sequence
  RPE65 RNA guide
ggguacacucuuuuugcugua

SEQ ID NO: 42897 - RNA, 21 nt, Artificial Sequence
  RPE65 RNA guide
ggguagggaugagggcaguac

SEQ ID NO: 42898 - RNA, 21 nt, Artificial Sequence
  RPE65 RNA guide
gguacacucuuuuugcuguag

SEQ ID NO: 42899 - RNA, 21 nt, Artificial Sequence
  RPE65 RNA guide
gguagggaugagggcaguacu

SEQ ID NO: 42900 - RNA, 21 nt, Artificial Sequence
  RPE65 RNA guide
guaacuuucucacaauauaga

SEQ ID NO: 42901 - RNA, 21 nt, Artificial Sequence
  RPE65 RNA guide
guacacucucauauauguaug

SEQ ID NO: 42902 - RNA, 21 nt, Artificial Sequence
  RPE65 RNA guide
guacacucuuuuugcuguagu

SEQ ID NO: 42903 - RNA, 21 nt, Artificial Sequence
  RPE65 RNA guide
guacuaaauauguugcgcuua

SEQ ID NO: 42904 - RNA, 21 nt, Artificial Sequence
  RPE65 RNA guide
guacuauagaaaaagaacuac

SEQ ID NO: 42905 - RNA, 21 nt, Artificial Sequence
  RPE65 RNA guide
guacugcccucaucccuaccc

SEQ ID NO: 42906 - RNA, 21 nt, Artificial Sequence
  RPE65 RNA guide
guacuucugaagucugagagu

SEQ ID NO: 42907 - RNA, 21 nt, Artificial Sequence
  RPE65 RNA guide
guagggaugagggcaguacuu

SEQ ID NO: 42908 - RNA, 21 nt, Artificial Sequence
  RPE65 RNA guide
guaguuuugggaauuaagcgc

SEQ ID NO: 42909 - RNA, 21 nt, Artificial Sequence
  RPE65 RNA guide
guaugcuauuaugcacacaua

SEQ ID NO: 42910 - RNA, 21 nt, Artificial Sequence
  RPE65 RNA guide
guauguaugcuauuaugcaca

SEQ ID NO: 42911 - RNA, 21 nt, Artificial Sequence
  RPE65 RNA guide
guaugugugcauaauagcaua

SEQ ID NO: 42912 - RNA, 21 nt, Artificial Sequence
  RPE65 RNA guide
guauugugagaaagauaagaa

SEQ ID NO: 42913 - RNA, 21 nt, Artificial Sequence
  RPE65 RNA guide
gucagaauagcauuuugugca

SEQ ID NO: 42914 - RNA, 21 nt, Artificial Sequence
  RPE65 RNA guide
gucauccuuugauaugaugcc

SEQ ID NO: 42915 - RNA, 21 nt, Artificial Sequence
  RPE65 RNA guide
guccaaguucucuucuagaau

SEQ ID NO: 42916 - RNA, 21 nt, Artificial Sequence
  RPE65 RNA guide
guccucuucugaaaauaagug

SEQ ID NO: 42917 - RNA, 21 nt, Artificial Sequence
  RPE65 RNA guide
gucgucauccuuugauaugau

SEQ ID NO: 42918 - RNA, 21 nt, Artificial Sequence
  RPE65 RNA guide
gucuauauugugagaaaguua

SEQ ID NO: 42919 - RNA, 21 nt, Artificial Sequence
  RPE65 RNA guide
gucugagaguaauuuaacuau

SEQ ID NO: 42920 - RNA, 21 nt, Artificial Sequence
  RPE65 RNA guide
gugagaaagauaagaauguca

SEQ ID NO: 42921 - RNA, 21 nt, Artificial Sequence
  RPE65 RNA guide
gugagaaaguuacuguauugu

SEQ ID NO: 42922 - RNA, 21 nt, Artificial Sequence
  RPE65 RNA guide
gugaguuuaccaaucuguccu

SEQ ID NO: 42923 - RNA, 21 nt, Artificial Sequence
  RPE65 RNA guide
gugcauaguuaaauuacucuc

SEQ ID NO: 42924 - RNA, 21 nt, Artificial Sequence
  RPE65 RNA guide
gugcucaauaaauguuugcua

SEQ ID NO: 42925 - RNA, 21 nt, Artificial Sequence
  RPE65 RNA guide
guguacuaaauauguugcgcu

SEQ ID NO: 42926 - RNA, 21 nt, Artificial Sequence
  RPE65 RNA guide
guguccaaguucucuucuaga

SEQ ID NO: 42927 - RNA, 21 nt, Artificial Sequence
  RPE65 RNA guide
gugucuauauugugagaaagu

SEQ ID NO: 42928 - RNA, 21 nt, Artificial Sequence
  RPE65 RNA guide
gugugcauaauagcauacaua

SEQ ID NO: 42929 - RNA, 21 nt, Artificial Sequence
  RPE65 RNA guide
guuaaauuacucucagacuuc

SEQ ID NO: 42930 - RNA, 21 nt, Artificial Sequence
  RPE65 RNA guide
guuacuguauugugagaaaga

SEQ ID NO: 42931 - RNA, 21 nt, Artificial Sequence
  RPE65 RNA guide
guugcgcuuaauucccaaaac

SEQ ID NO: 42932 - RNA, 21 nt, Artificial Sequence
  RPE65 RNA guide
guuuaccaaucuguccucuuc

SEQ ID NO: 42933 - RNA, 21 nt, Artificial Sequence
  RPE65 RNA guide
guuugcuaaguuugaauccua

SEQ ID NO: 42934 - RNA, 21 nt, Artificial Sequence
  RPE65 RNA guide
guuuguaguuuugggaauuaa

SEQ ID NO: 42935 - RNA, 21 nt, Artificial Sequence
  RPE65 RNA guide
guuuugggaauuaagcgcaac

SEQ ID NO: 42936 - RNA, 21 nt, Artificial Sequence
  RPE65 RNA guide
uaaauauguugcgcuuaauuc

SEQ ID NO: 42937 - RNA, 21 nt, Artificial Sequence
  RPE65 RNA guide
uaaauuacucucagacuucag

SEQ ID NO: 42938 - RNA, 21 nt, Artificial Sequence
  RPE65 RNA guide
uaacagauuuguuuguaguuu

SEQ ID NO: 42939 - RNA, 21 nt, Artificial Sequence
  RPE65 RNA guide
uaacuaugcacaaaaugcuau

SEQ ID NO: 42940 - RNA, 21 nt, Artificial Sequence
  RPE65 RNA guide
uaagcauguaugugugcauaa

SEQ ID NO: 42941 - RNA, 21 nt, Artificial Sequence
  RPE65 RNA guide
uaagcgcaacauauuuaguac

SEQ ID NO: 42942 - RNA, 21 nt, Artificial Sequence
  RPE65 RNA guide
uaaggggccuaaugcccaagg

SEQ ID NO: 42943 - RNA, 21 nt, Artificial Sequence
  RPE65 RNA guide
uaauauucuagaagagaacuu

SEQ ID NO: 42944 - RNA, 21 nt, Artificial Sequence
  RPE65 RNA guide
uaaugcccaagggcaucauau

SEQ ID NO: 42945 - RNA, 21 nt, Artificial Sequence
  RPE65 RNA guide
uaauuuugccuagcacaugaa

SEQ ID NO: 42946 - RNA, 21 nt, Artificial Sequence
  RPE65 RNA guide
uacacucucauauauguaugu

SEQ ID NO: 42947 - RNA, 21 nt, Artificial Sequence
  RPE65 RNA guide
uacacucuuuuugcuguaguu

SEQ ID NO: 42948 - RNA, 21 nt, Artificial Sequence
  RPE65 RNA guide
uacagcaaaaagaguguaccc

SEQ ID NO: 42949 - RNA, 21 nt, Artificial Sequence
  RPE65 RNA guide
uaccaaucuguccucuucuga

SEQ ID NO: 42950 - RNA, 21 nt, Artificial Sequence
  RPE65 RNA guide
uacccuauaaggggccuaaug

SEQ ID NO: 42951 - RNA, 21 nt, Artificial Sequence
  RPE65 RNA guide
uacuaaauauguugcgcuuaa

SEQ ID NO: 42952 - RNA, 21 nt, Artificial Sequence
  RPE65 RNA guide
uacucucagacuucagaagua

SEQ ID NO: 42953 - RNA, 21 nt, Artificial Sequence
  RPE65 RNA guide
uacugcccucaucccuacccu

SEQ ID NO: 42954 - RNA, 21 nt, Artificial Sequence
  RPE65 RNA guide
uacuucugaagucugagagua

SEQ ID NO: 42955 - RNA, 21 nt, Artificial Sequence
  RPE65 RNA guide
uagaaagcaaguguccaaguu

SEQ ID NO: 42956 - RNA, 21 nt, Artificial Sequence
  RPE65 RNA guide
uagaagagaacuuggacacuu

SEQ ID NO: 42957 - RNA, 21 nt, Artificial Sequence
  RPE65 RNA guide
uagacacuuauuuucagaaga

SEQ ID NO: 42958 - RNA, 21 nt, Artificial Sequence
  RPE65 RNA guide
uagcacaugaauaagugcuca

SEQ ID NO: 42959 - RNA, 21 nt, Artificial Sequence
  RPE65 RNA guide
uagcauacauacauauaugag

SEQ ID NO: 42960 - RNA, 21 nt, Artificial Sequence
  RPE65 RNA guide
uaggccccuuauaggguaggg

SEQ ID NO: 42961 - RNA, 21 nt, Artificial Sequence
  RPE65 RNA guide
uagggaugagggcaguacuuc

SEQ ID NO: 42962 - RNA, 21 nt, Artificial Sequence
  RPE65 RNA guide
uaggguacacucuuuuugcug

SEQ ID NO: 42963 - RNA, 21 nt, Artificial Sequence
  RPE65 RNA guide
uaggguagggaugagggcagu

SEQ ID NO: 42964 - RNA, 21 nt, Artificial Sequence
  RPE65 RNA guide
uaguuaaauuacucucagacu

SEQ ID NO: 42965 - RNA, 21 nt, Artificial Sequence
  RPE65 RNA guide
uaguuuugggaauuaagcgca

SEQ ID NO: 42966 - RNA, 21 nt, Artificial Sequence
  RPE65 RNA guide
uauaaggggccuaaugcccaa

SEQ ID NO: 42967 - RNA, 21 nt, Artificial Sequence
  RPE65 RNA guide
uauagaaagcaaguguccaag

SEQ ID NO: 42968 - RNA, 21 nt, Artificial Sequence
  RPE65 RNA guide
uauagacacuuauuuucagaa

SEQ ID NO: 42969 - RNA, 21 nt, Artificial Sequence
  RPE65 RNA guide
uauaggguagggaugagggca

SEQ ID NO: 42970 - RNA, 21 nt, Artificial Sequence
  RPE65 RNA guide
uauauuuucaagucgucaucc

SEQ ID NO: 42971 - RNA, 21 nt, Artificial Sequence
  RPE65 RNA guide
uaucaaaggaugacgacuuga

SEQ ID NO: 42972 - RNA, 21 nt, Artificial Sequence
  RPE65 RNA guide
uaugagaguguacuaaauaug

SEQ ID NO: 42973 - RNA, 21 nt, Artificial Sequence
  RPE65 RNA guide
uaugaugcccuugggcauuag

SEQ ID NO: 42974 - RNA, 21 nt, Artificial Sequence
  RPE65 RNA guide
uaugcacaaaaugcuauucug

SEQ ID NO: 42975 - RNA, 21 nt, Artificial Sequence
  RPE65 RNA guide
uaugcuauuaugcacacauac

SEQ ID NO: 42976 - RNA, 21 nt, Artificial Sequence
  RPE65 RNA guide
uauguaugcuauuaugcacac

SEQ ID NO: 42977 - RNA, 21 nt, Artificial Sequence
  RPE65 RNA guide
uauguauguaugcuauuaugc

SEQ ID NO: 42978 - RNA, 21 nt, Artificial Sequence
  RPE65 RNA guide
uaugugugcauaauagcauac

SEQ ID NO: 42979 - RNA, 21 nt, Artificial Sequence
  RPE65 RNA guide
uauguugcgcuuaauucccaa

SEQ ID NO: 42980 - RNA, 21 nt, Artificial Sequence
  RPE65 RNA guide
uauucuagaagagaacuugga

SEQ ID NO: 42981 - RNA, 21 nt, Artificial Sequence
  RPE65 RNA guide
uauugagcacuuauucaugug

SEQ ID NO: 42982 - RNA, 21 nt, Artificial Sequence
  RPE65 RNA guide
uauuuucaagucgucauccuu

SEQ ID NO: 42983 - RNA, 21 nt, Artificial Sequence
  RPE65 RNA guide
uauuuucagaagaggacagau

SEQ ID NO: 42984 - RNA, 21 nt, Artificial Sequence
  RPE65 RNA guide
ucaaaggaugacgacuugaaa

SEQ ID NO: 42985 - RNA, 21 nt, Artificial Sequence
  RPE65 RNA guide
ucaagucgucauccuuugaua

SEQ ID NO: 42986 - RNA, 21 nt, Artificial Sequence
  RPE65 RNA guide
ucacaauacaguaacuuucuc

SEQ ID NO: 42987 - RNA, 21 nt, Artificial Sequence
  RPE65 RNA guide
ucagaagaggacagauuggua

SEQ ID NO: 42988 - RNA, 21 nt, Artificial Sequence
  RPE65 RNA guide
ucagaaguacugcccucaucc

SEQ ID NO: 42989 - RNA, 21 nt, Artificial Sequence
  RPE65 RNA guide
ucagaauagcauuuugugcau

SEQ ID NO: 42990 - RNA, 21 nt, Artificial Sequence
  RPE65 RNA guide
ucagacuucagaaguacugcc

SEQ ID NO: 42991 - RNA, 21 nt, Artificial Sequence
  RPE65 RNA guide
ucauaucaaaggaugacgacu

SEQ ID NO: 42992 - RNA, 21 nt, Artificial Sequence
  RPE65 RNA guide
ucaucccuacccuauaagggg

SEQ ID NO: 42993 - RNA, 21 nt, Artificial Sequence
  RPE65 RNA guide
ucauccuuugauaugaugccc

SEQ ID NO: 42994 - RNA, 21 nt, Artificial Sequence
  RPE65 RNA guide
ucccaaaacuacaaacaaauc

SEQ ID NO: 42995 - RNA, 21 nt, Artificial Sequence
  RPE65 RNA guide
ucccuacccuauaaggggccu

SEQ ID NO: 42996 - RNA, 21 nt, Artificial Sequence
  RPE65 RNA guide
uccucuucugaaaauaagugu

SEQ ID NO: 42997 - RNA, 21 nt, Artificial Sequence
  RPE65 RNA guide
uccuuugauaugaugcccuug

SEQ ID NO: 42998 - RNA, 21 nt, Artificial Sequence
  RPE65 RNA guide
ucgucauccuuugauaugaug

SEQ ID NO: 42999 - RNA, 21 nt, Artificial Sequence
  RPE65 RNA guide
ucuagaagagaacuuggacac

SEQ ID NO: 43000 - RNA, 21 nt, Artificial Sequence
  RPE65 RNA guide
ucuaggguacacucuuuuugc

SEQ ID NO: 43001 - RNA, 21 nt, Artificial Sequence
  RPE65 RNA guide
ucuauauuuucaagucgucau

SEQ ID NO: 43002 - RNA, 21 nt, Artificial Sequence
  RPE65 RNA guide
ucucacaauacaguaacuuuc

SEQ ID NO: 43003 - RNA, 21 nt, Artificial Sequence
  RPE65 RNA guide
ucucagacuucagaaguacug

SEQ ID NO: 43004 - RNA, 21 nt, Artificial Sequence
  RPE65 RNA guide
ucugaagucugagaguaauuu

SEQ ID NO: 43005 - RNA, 21 nt, Artificial Sequence
  RPE65 RNA guide
ucugacauucuuaucuuucuc

SEQ ID NO: 43006 - RNA, 21 nt, Artificial Sequence
  RPE65 RNA guide
ucugagaguaauuuaacuaug

SEQ ID NO: 43007 - RNA, 21 nt, Artificial Sequence
  RPE65 RNA guide
ucuguccucuucugaaaauaa

SEQ ID NO: 43008 - RNA, 21 nt, Artificial Sequence
  RPE65 RNA guide
ucuuucucacaauacaguaac

SEQ ID NO: 43009 - RNA, 21 nt, Artificial Sequence
  RPE65 RNA guide
ugaaaauauagaaagcaagug

SEQ ID NO: 43010 - RNA, 21 nt, Artificial Sequence
  RPE65 RNA guide
ugacgacuugaaaauauagaa

SEQ ID NO: 43011 - RNA, 21 nt, Artificial Sequence
  RPE65 RNA guide
ugagaaaguuacuguauugug

SEQ ID NO: 43012 - RNA, 21 nt, Artificial Sequence
  RPE65 RNA guide
ugagaguguacuaaauauguu

SEQ ID NO: 43013 - RNA, 21 nt, Artificial Sequence
  RPE65 RNA guide
ugagcacuuauucaugugcua

SEQ ID NO: 43014 - RNA, 21 nt, Artificial Sequence
  RPE65 RNA guide
ugagggcaguacuucugaagu

SEQ ID NO: 43015 - RNA, 21 nt, Artificial Sequence
  RPE65 RNA guide
ugaguuuaccaaucuguccuc

SEQ ID NO: 43016 - RNA, 21 nt, Artificial Sequence
  RPE65 RNA guide
ugauaugaugcccuugggcau

SEQ ID NO: 43017 - RNA, 21 nt, Artificial Sequence
  RPE65 RNA guide
ugaugcccuugggcauuaggc

SEQ ID NO: 43018 - RNA, 21 nt, Artificial Sequence
  RPE65 RNA guide
ugcacaaaaugcuauucugac

SEQ ID NO: 43019 - RNA, 21 nt, Artificial Sequence
  RPE65 RNA guide
ugcauaguuaaauuacucuca

SEQ ID NO: 43020 - RNA, 21 nt, Artificial Sequence
  RPE65 RNA guide
ugcccaagggcaucauaucaa

SEQ ID NO: 43021 - RNA, 21 nt, Artificial Sequence
  RPE65 RNA guide
ugcccucaucccuacccuaua

SEQ ID NO: 43022 - RNA, 21 nt, Artificial Sequence
  RPE65 RNA guide
ugcccuugggcauuaggcccc

SEQ ID NO: 43023 - RNA, 21 nt, Artificial Sequence
  RPE65 RNA guide
ugccuagcacaugaauaagug

SEQ ID NO: 43024 - RNA, 21 nt, Artificial Sequence
  RPE65 RNA guide
ugcgcuuaauucccaaaacua

SEQ ID NO: 43025 - RNA, 21 nt, Artificial Sequence
  RPE65 RNA guide
ugcuauuaugcacacauacau

SEQ ID NO: 43026 - RNA, 21 nt, Artificial Sequence
  RPE65 RNA guide
ugcuauucugacauucuuauc

SEQ ID NO: 43027 - RNA, 21 nt, Artificial Sequence
  RPE65 RNA guide
ugcuguaguucuuuuucuaua

SEQ ID NO: 43028 - RNA, 21 nt, Artificial Sequence
  RPE65 RNA guide
ugcuuucuauauuuucaaguc

SEQ ID NO: 43029 - RNA, 21 nt, Artificial Sequence
  RPE65 RNA guide
uggacacuugcuuucuauauu

SEQ ID NO: 43030 - RNA, 21 nt, Artificial Sequence
  RPE65 RNA guide
ugggaauuaagcgcaacauau

SEQ ID NO: 43031 - RNA, 21 nt, Artificial Sequence
  RPE65 RNA guide
ugggcauuaggccccuuauag

SEQ ID NO: 43032 - RNA, 21 nt, Artificial Sequence
  RPE65 RNA guide
uguaguuuugggaauuaagcg

SEQ ID NO: 43033 - RNA, 21 nt, Artificial Sequence
  RPE65 RNA guide
uguaugcuauuaugcacacau

SEQ ID NO: 43034 - RNA, 21 nt, Artificial Sequence
  RPE65 RNA guide
uguauguaugcuauuaugcac

SEQ ID NO: 43035 - RNA, 21 nt, Artificial Sequence
  RPE65 RNA guide
uguaugugugcauaauagcau

SEQ ID NO: 43036 - RNA, 21 nt, Artificial Sequence
  RPE65 RNA guide
ugucagaauagcauuuugugc

SEQ ID NO: 43037 - RNA, 21 nt, Artificial Sequence
  RPE65 RNA guide
uguccaaguucucuucuagaa

SEQ ID NO: 43038 - RNA, 21 nt, Artificial Sequence
  RPE65 RNA guide
uguccucuucugaaaauaagu

SEQ ID NO: 43039 - RNA, 21 nt, Artificial Sequence
  RPE65 RNA guide
ugucuauauugugagaaaguu

SEQ ID NO: 43040 - RNA, 21 nt, Artificial Sequence
  RPE65 RNA guide
ugugagaaagauaagaauguc

SEQ ID NO: 43041 - RNA, 21 nt, Artificial Sequence
  RPE65 RNA guide
ugugagaaaguuacuguauug

SEQ ID NO: 43042 - RNA, 21 nt, Artificial Sequence
  RPE65 RNA guide
ugugcauaguuaaauuacucu

SEQ ID NO: 43043 - RNA, 21 nt, Artificial Sequence
  RPE65 RNA guide
ugugugcauaauagcauacau

SEQ ID NO: 43044 - RNA, 21 nt, Artificial Sequence
  RPE65 RNA guide
uguugcgcuuaauucccaaaa

SEQ ID NO: 43045 - RNA, 21 nt, Artificial Sequence
  RPE65 RNA guide
uguuuguaguuuugggaauua

SEQ ID NO: 43046 - RNA, 21 nt, Artificial Sequence
  RPE65 RNA guide
uuaaauuacucucagacuuca

SEQ ID NO: 43047 - RNA, 21 nt, Artificial Sequence
  RPE65 RNA guide
uuaagcgcaacauauuuagua

SEQ ID NO: 43048 - RNA, 21 nt, Artificial Sequence
  RPE65 RNA guide
uuaccaaucuguccucuucug

SEQ ID NO: 43049 - RNA, 21 nt, Artificial Sequence
  RPE65 RNA guide
uuacucucagacuucagaagu

SEQ ID NO: 43050 - RNA, 21 nt, Artificial Sequence
  RPE65 RNA guide
uuaggccccuuauaggguagg

SEQ ID NO: 43051 - RNA, 21 nt, Artificial Sequence
  RPE65 RNA guide
uuauaggguagggaugagggc

SEQ ID NO: 43052 - RNA, 21 nt, Artificial Sequence
  RPE65 RNA guide
uuauugagcacuuauucaugu

SEQ ID NO: 43053 - RNA, 21 nt, Artificial Sequence
  RPE65 RNA guide
uuauuuucagaagaggacaga

SEQ ID NO: 43054 - RNA, 21 nt, Artificial Sequence
  RPE65 RNA guide
uucaagucgucauccuuugau

SEQ ID NO: 43055 - RNA, 21 nt, Artificial Sequence
  RPE65 RNA guide
uucagaagaggacagauuggu

SEQ ID NO: 43056 - RNA, 21 nt, Artificial Sequence
  RPE65 RNA guide
uucagaaguacugcccucauc

SEQ ID NO: 43057 - RNA, 21 nt, Artificial Sequence
  RPE65 RNA guide
uucccaaaacuacaaacaaau

SEQ ID NO: 43058 - RNA, 21 nt, Artificial Sequence
  RPE65 RNA guide
uucuagaagagaacuuggaca

SEQ ID NO: 43059 - RNA, 21 nt, Artificial Sequence
  RPE65 RNA guide
uucuaggguacacucuuuuug

SEQ ID NO: 43060 - RNA, 21 nt, Artificial Sequence
  RPE65 RNA guide
uucuauauuuucaagucguca

SEQ ID NO: 43061 - RNA, 21 nt, Artificial Sequence
  RPE65 RNA guide
uucucacaauacaguaacuuu

SEQ ID NO: 43062 - RNA, 21 nt, Artificial Sequence
  RPE65 RNA guide
uucugaagucugagaguaauu

SEQ ID NO: 43063 - RNA, 21 nt, Artificial Sequence
  RPE65 RNA guide
uucugacauucuuaucuuucu

SEQ ID NO: 43064 - RNA, 21 nt, Artificial Sequence
  RPE65 RNA guide
uugaaaauauagaaagcaagu

SEQ ID NO: 43065 - RNA, 21 nt, Artificial Sequence
  RPE65 RNA guide
uugagcacuuauucaugugcu

SEQ ID NO: 43066 - RNA, 21 nt, Artificial Sequence
  RPE65 RNA guide
uugauaugaugcccuugggca

SEQ ID NO: 43067 - RNA, 21 nt, Artificial Sequence
  RPE65 RNA guide
uugccuagcacaugaauaagu

SEQ ID NO: 43068 - RNA, 21 nt, Artificial Sequence
  RPE65 RNA guide
uugcgcuuaauucccaaaacu

SEQ ID NO: 43069 - RNA, 21 nt, Artificial Sequence
  RPE65 RNA guide
uugcuuucuauauuuucaagu

SEQ ID NO: 43070 - RNA, 21 nt, Artificial Sequence
  RPE65 RNA guide
uuggacacuugcuuucuauau

SEQ ID NO: 43071 - RNA, 21 nt, Artificial Sequence
  RPE65 RNA guide
uugggaauuaagcgcaacaua

SEQ ID NO: 43072 - RNA, 21 nt, Artificial Sequence
  RPE65 RNA guide
uugggcauuaggccccuuaua

SEQ ID NO: 43073 - RNA, 21 nt, Artificial Sequence
  RPE65 RNA guide
uuguaguuuugggaauuaagc

SEQ ID NO: 43074 - RNA, 21 nt, Artificial Sequence
  RPE65 RNA guide
uugugagaaagauaagaaugu

SEQ ID NO: 43075 - RNA, 21 nt, Artificial Sequence
  RPE65 RNA guide
uugugagaaaguuacuguauu

SEQ ID NO: 43076 - RNA, 21 nt, Artificial Sequence
  RPE65 RNA guide
uugugcauaguuaaauuacuc

SEQ ID NO: 43077 - RNA, 21 nt, Artificial Sequence
  RPE65 RNA guide
uuguuuguaguuuugggaauu

SEQ ID NO: 43078 - RNA, 21 nt, Artificial Sequence
  RPE65 RNA guide
uuuaccaaucuguccucuucu

SEQ ID NO: 43079 - RNA, 21 nt, Artificial Sequence
  RPE65 RNA guide
uuuauugagcacuuauucaug

SEQ ID NO: 43080 - RNA, 21 nt, Artificial Sequence
  RPE65 RNA guide
uuucaagucgucauccuuuga

SEQ ID NO: 43081 - RNA, 21 nt, Artificial Sequence
  RPE65 RNA guide
uuucagaagaggacagauugg

SEQ ID NO: 43082 - RNA, 21 nt, Artificial Sequence
  RPE65 RNA guide
uuucuauauuuucaagucguc

SEQ ID NO: 43083 - RNA, 21 nt, Artificial Sequence
  RPE65 RNA guide
uuucucacaauacaguaacuu

SEQ ID NO: 43084 - RNA, 21 nt, Artificial Sequence
  RPE65 RNA guide
uuugauaugaugcccuugggc

SEQ ID NO: 43085 - RNA, 21 nt, Artificial Sequence
  RPE65 RNA guide
uuugccuagcacaugaauaag

SEQ ID NO: 43086 - RNA, 21 nt, Artificial Sequence
  RPE65 RNA guide
uuugggaauuaagcgcaacau

SEQ ID NO: 43087 - RNA, 21 nt, Artificial Sequence
  RPE65 RNA guide
uuuguaguuuugggaauuaag

SEQ ID NO: 43088 - RNA, 21 nt, Artificial Sequence
  RPE65 RNA guide
uuuucaagucgucauccuuug

SEQ ID NO: 43089 - RNA, 21 nt, Artificial Sequence
  RPE65 RNA guide
uuuucagaagaggacagauug

SEQ ID NO: 43090 - RNA, 21 nt, Artificial Sequence
  RPE65 RNA guide
uuuugccuagcacaugaauaa

SEQ ID NO: 43091 - RNA, 21 nt, Artificial Sequence
  RPE65 RNA guide
uuuugggaauuaagcgcaaca

SEQ ID NO: 43092 - RNA, 22 nt, Artificial Sequence
  RPE65 RNA guide
aaaaagaacuacagcaaaaaga

SEQ ID NO: 43093 - RNA, 22 nt, Artificial Sequence
  RPE65 RNA guide
aaaagaacuacagcaaaaagag

SEQ ID NO: 43094 - RNA, 22 nt, Artificial Sequence
  RPE65 RNA guide
aaaauauagaaagcaagugucc

SEQ ID NO: 43095 - RNA, 22 nt, Artificial Sequence
  RPE65 RNA guide
aaacuuagcaaacauuuauuga

SEQ ID NO: 43096 - RNA, 22 nt, Artificial Sequence
  RPE65 RNA guide
aaagaacuacagcaaaaagagu

SEQ ID NO: 43097 - RNA, 22 nt, Artificial Sequence
  RPE65 RNA guide
aaagcaaguguccaaguucucu

SEQ ID NO: 43098 - RNA, 22 nt, Artificial Sequence
  RPE65 RNA guide
aaaggaugacgacuugaaaaua

SEQ ID NO: 43099 - RNA, 22 nt, Artificial Sequence
  RPE65 RNA guide
aaauauagaaagcaagugucca

SEQ ID NO: 43100 - RNA, 22 nt, Artificial Sequence
  RPE65 RNA guide
aaauauguugcgcuuaauuccc

SEQ ID NO: 43101 - RNA, 22 nt, Artificial Sequence
  RPE65 RNA guide
aaauuacucucagacuucagaa

SEQ ID NO: 43102 - RNA, 22 nt, Artificial Sequence
  RPE65 RNA guide
aacagauuuguuuguaguuuug

SEQ ID NO: 43103 - RNA, 22 nt, Artificial Sequence
  RPE65 RNA guide
aacuacagcaaaaagaguguac

SEQ ID NO: 43104 - RNA, 22 nt, Artificial Sequence
  RPE65 RNA guide
aacuaugcacaaaaugcuauuc

SEQ ID NO: 43105 - RNA, 22 nt, Artificial Sequence
  RPE65 RNA guide
aacuuagcaaacauuuauugag

SEQ ID NO: 43106 - RNA, 22 nt, Artificial Sequence
  RPE65 RNA guide
aacuuggacacuugcuuucuau

SEQ ID NO: 43107 - RNA, 22 nt, Artificial Sequence
  RPE65 RNA guide
aagaacuacagcaaaaagagug

SEQ ID NO: 43108 - RNA, 22 nt, Artificial Sequence
  RPE65 RNA guide
aagaaugucagaauagcauuuu

SEQ ID NO: 43109 - RNA, 22 nt, Artificial Sequence
  RPE65 RNA guide
aagagaacuuggacacuugcuu

SEQ ID NO: 43110 - RNA, 22 nt, Artificial Sequence
  RPE65 RNA guide
aagcaaguguccaaguucucuu

SEQ ID NO: 43111 - RNA, 22 nt, Artificial Sequence
  RPE65 RNA guide
aagcauguaugugugcauaaua

SEQ ID NO: 43112 - RNA, 22 nt, Artificial Sequence
  RPE65 RNA guide
aagcgcaacauauuuaguacac

SEQ ID NO: 43113 - RNA, 22 nt, Artificial Sequence
  RPE65 RNA guide
aaggaugacgacuugaaaauau

SEQ ID NO: 43114 - RNA, 22 nt, Artificial Sequence
  RPE65 RNA guide
aagggcaucauaucaaaggaug

SEQ ID NO: 43115 - RNA, 22 nt, Artificial Sequence
  RPE65 RNA guide
aaggggccuaaugcccaagggc

SEQ ID NO: 43116 - RNA, 22 nt, Artificial Sequence
  RPE65 RNA guide
aaguacuauagaaaaagaacua

SEQ ID NO: 43117 - RNA, 22 nt, Artificial Sequence
  RPE65 RNA guide
aaguacugcccucaucccuacc

SEQ ID NO: 43118 - RNA, 22 nt, Artificial Sequence
  RPE65 RNA guide
aagucgucauccuuugauauga

SEQ ID NO: 43119 - RNA, 22 nt, Artificial Sequence
  RPE65 RNA guide
aagucugagaguaauuuaacua

SEQ ID NO: 43120 - RNA, 22 nt, Artificial Sequence
  RPE65 RNA guide
aagugcucaauaaauguuugcu

SEQ ID NO: 43121 - RNA, 22 nt, Artificial Sequence
  RPE65 RNA guide
aaguguccaaguucucuucuag

SEQ ID NO: 43122 - RNA, 22 nt, Artificial Sequence
  RPE65 RNA guide
aagugucuauauugugagaaag

SEQ ID NO: 43123 - RNA, 22 nt, Artificial Sequence
  RPE65 RNA guide
aauaagcauguaugugugcaua

SEQ ID NO: 43124 - RNA, 22 nt, Artificial Sequence
  RPE65 RNA guide
aauauagaaagcaaguguccaa

SEQ ID NO: 43125 - RNA, 22 nt, Artificial Sequence
  RPE65 RNA guide
aauauguugcgcuuaauuccca

SEQ ID NO: 43126 - RNA, 22 nt, Artificial Sequence
  RPE65 RNA guide
aauauucuagaagagaacuugg

SEQ ID NO: 43127 - RNA, 22 nt, Artificial Sequence
  RPE65 RNA guide
aaucuguccucuucugaaaaua

SEQ ID NO: 43128 - RNA, 22 nt, Artificial Sequence
  RPE65 RNA guide
aaugcccaagggcaucauauca

SEQ ID NO: 43129 - RNA, 22 nt, Artificial Sequence
  RPE65 RNA guide
aaugucagaauagcauuuugug

SEQ ID NO: 43130 - RNA, 22 nt, Artificial Sequence
  RPE65 RNA guide
aauuaagcgcaacauauuuagu

SEQ ID NO: 43131 - RNA, 22 nt, Artificial Sequence
  RPE65 RNA guide
aauuacucucagacuucagaag

SEQ ID NO: 43132 - RNA, 22 nt, Artificial Sequence
  RPE65 RNA guide
aauucccaaaacuacaaacaaa

SEQ ID NO: 43133 - RNA, 22 nt, Artificial Sequence
  RPE65 RNA guide
aauucuaggguacacucuuuuu

SEQ ID NO: 43134 - RNA, 22 nt, Artificial Sequence
  RPE65 RNA guide
aauuuugccuagcacaugaaua

SEQ ID NO: 43135 - RNA, 22 nt, Artificial Sequence
  RPE65 RNA guide
acaaaucuguuaucucauagaa

SEQ ID NO: 43136 - RNA, 22 nt, Artificial Sequence
  RPE65 RNA guide
acaauuaggauucaaacuuagc

SEQ ID NO: 43137 - RNA, 22 nt, Artificial Sequence
  RPE65 RNA guide
acacucucauauauguauguau

SEQ ID NO: 43138 - RNA, 22 nt, Artificial Sequence
  RPE65 RNA guide
acacucuuuuugcuguaguucu

SEQ ID NO: 43139 - RNA, 22 nt, Artificial Sequence
  RPE65 RNA guide
acacuuauuuucagaagaggac

SEQ ID NO: 43140 - RNA, 22 nt, Artificial Sequence
  RPE65 RNA guide
acacuugcuuucuauauuuuca

SEQ ID NO: 43141 - RNA, 22 nt, Artificial Sequence
  RPE65 RNA guide
acagauuuguuuguaguuuugg

SEQ ID NO: 43142 - RNA, 22 nt, Artificial Sequence
  RPE65 RNA guide
acagcaaaaagaguguacccua

SEQ ID NO: 43143 - RNA, 22 nt, Artificial Sequence
  RPE65 RNA guide
acaguaacuuucucacaauaua

SEQ ID NO: 43144 - RNA, 22 nt, Artificial Sequence
  RPE65 RNA guide
acauucuuaucuuucucacaau

SEQ ID NO: 43145 - RNA, 22 nt, Artificial Sequence
  RPE65 RNA guide
acauuuauugagcacuuauuca

SEQ ID NO: 43146 - RNA, 22 nt, Artificial Sequence
  RPE65 RNA guide
accaaucuguccucuucugaaa

SEQ ID NO: 43147 - RNA, 22 nt, Artificial Sequence
  RPE65 RNA guide
acccuauaaggggccuaaugcc

SEQ ID NO: 43148 - RNA, 22 nt, Artificial Sequence
  RPE65 RNA guide
acgacuugaaaauauagaaagc

SEQ ID NO: 43149 - RNA, 22 nt, Artificial Sequence
  RPE65 RNA guide
acuaaauauguugcgcuuaauu

SEQ ID NO: 43150 - RNA, 22 nt, Artificial Sequence
  RPE65 RNA guide
acuacagcaaaaagaguguacc

SEQ ID NO: 43151 - RNA, 22 nt, Artificial Sequence
  RPE65 RNA guide
acuaugcacaaaaugcuauucu

SEQ ID NO: 43152 - RNA, 22 nt, Artificial Sequence
  RPE65 RNA guide
acucucagacuucagaaguacu

SEQ ID NO: 43153 - RNA, 22 nt, Artificial Sequence
  RPE65 RNA guide
acucuuuuugcuguaguucuuu

SEQ ID NO: 43154 - RNA, 22 nt, Artificial Sequence
  RPE65 RNA guide
acugcccucaucccuacccuau

SEQ ID NO: 43155 - RNA, 22 nt, Artificial Sequence
  RPE65 RNA guide
acuguauugugagaaagauaag

SEQ ID NO: 43156 - RNA, 22 nt, Artificial Sequence
  RPE65 RNA guide
acuuagcaaacauuuauugagc

SEQ ID NO: 43157 - RNA, 22 nt, Artificial Sequence
  RPE65 RNA guide
acuuauucaugugcuaggcaaa

SEQ ID NO: 43158 - RNA, 22 nt, Artificial Sequence
  RPE65 RNA guide
acuuauuuucagaagaggacag

SEQ ID NO: 43159 - RNA, 22 nt, Artificial Sequence
  RPE65 RNA guide
acuucagaaguacugcccucau

SEQ ID NO: 43160 - RNA, 22 nt, Artificial Sequence
  RPE65 RNA guide
acuucugaagucugagaguaau

SEQ ID NO: 43161 - RNA, 22 nt, Artificial Sequence
  RPE65 RNA guide
acuugaaaauauagaaagcaag

SEQ ID NO: 43162 - RNA, 22 nt, Artificial Sequence
  RPE65 RNA guide
acuugcuuucuauauuuucaag

SEQ ID NO: 43163 - RNA, 22 nt, Artificial Sequence
  RPE65 RNA guide
acuuggacacuugcuuucuaua

SEQ ID NO: 43164 - RNA, 22 nt, Artificial Sequence
  RPE65 RNA guide
agaaaaagaacuacagcaaaaa

SEQ ID NO: 43165 - RNA, 22 nt, Artificial Sequence
  RPE65 RNA guide
agaaagauaagaaugucagaau

SEQ ID NO: 43166 - RNA, 22 nt, Artificial Sequence
  RPE65 RNA guide
agaaagcaaguguccaaguucu

SEQ ID NO: 43167 - RNA, 22 nt, Artificial Sequence
  RPE65 RNA guide
agaaaguuacuguauugugaga

SEQ ID NO: 43168 - RNA, 22 nt, Artificial Sequence
  RPE65 RNA guide
agaacuacagcaaaaagagugu

SEQ ID NO: 43169 - RNA, 22 nt, Artificial Sequence
  RPE65 RNA guide
agaacuuggacacuugcuuucu

SEQ ID NO: 43170 - RNA, 22 nt, Artificial Sequence
  RPE65 RNA guide
agaagagaacuuggacacuugc

SEQ ID NO: 43171 - RNA, 22 nt, Artificial Sequence
  RPE65 RNA guide
agaagaggacagauugguaaac

SEQ ID NO: 43172 - RNA, 22 nt, Artificial Sequence
  RPE65 RNA guide
agaaguacugcccucaucccua

SEQ ID NO: 43173 - RNA, 22 nt, Artificial Sequence
  RPE65 RNA guide
agaaugucagaauagcauuuug

SEQ ID NO: 43174 - RNA, 22 nt, Artificial Sequence
  RPE65 RNA guide
agacacuuauuuucagaagagg

SEQ ID NO: 43175 - RNA, 22 nt, Artificial Sequence
  RPE65 RNA guide
agacuucagaaguacugcccuc

SEQ ID NO: 43176 - RNA, 22 nt, Artificial Sequence
  RPE65 RNA guide
agagaacuuggacacuugcuuu

SEQ ID NO: 43177 - RNA, 22 nt, Artificial Sequence
  RPE65 RNA guide
agaguguacuaaauauguugcg

SEQ ID NO: 43178 - RNA, 22 nt, Artificial Sequence
  RPE65 RNA guide
agcaaacauuuauugagcacuu

SEQ ID NO: 43179 - RNA, 22 nt, Artificial Sequence
  RPE65 RNA guide
agcaaguguccaaguucucuuc

SEQ ID NO: 43180 - RNA, 22 nt, Artificial Sequence
  RPE65 RNA guide
agcacaugaauaagugcucaau

SEQ ID NO: 43181 - RNA, 22 nt, Artificial Sequence
  RPE65 RNA guide
agcacuuauucaugugcuaggc

SEQ ID NO: 43182 - RNA, 22 nt, Artificial Sequence
  RPE65 RNA guide
agcauacauacauauaugagag

SEQ ID NO: 43183 - RNA, 22 nt, Artificial Sequence
  RPE65 RNA guide
agcauguaugugugcauaauag

SEQ ID NO: 43184 - RNA, 22 nt, Artificial Sequence
  RPE65 RNA guide
agcgcaacauauuuaguacacu

SEQ ID NO: 43185 - RNA, 22 nt, Artificial Sequence
  RPE65 RNA guide
aggaugacgacuugaaaauaua

SEQ ID NO: 43186 - RNA, 22 nt, Artificial Sequence
  RPE65 RNA guide
aggccccuuauaggguagggau

SEQ ID NO: 43187 - RNA, 22 nt, Artificial Sequence
  RPE65 RNA guide
agggaugagggcaguacuucug

SEQ ID NO: 43188 - RNA, 22 nt, Artificial Sequence
  RPE65 RNA guide
agggcaguacuucugaagucug

SEQ ID NO: 43189 - RNA, 22 nt, Artificial Sequence
  RPE65 RNA guide
agggcaucauaucaaaggauga

SEQ ID NO: 43190 - RNA, 22 nt, Artificial Sequence
  RPE65 RNA guide
aggggccuaaugcccaagggca

SEQ ID NO: 43191 - RNA, 22 nt, Artificial Sequence
  RPE65 RNA guide
aggguacacucuuuuugcugua

SEQ ID NO: 43192 - RNA, 22 nt, Artificial Sequence
  RPE65 RNA guide
aggguagggaugagggcaguac

SEQ ID NO: 43193 - RNA, 22 nt, Artificial Sequence
  RPE65 RNA guide
aguaacuuucucacaauauaga

SEQ ID NO: 43194 - RNA, 22 nt, Artificial Sequence
  RPE65 RNA guide
aguacacucucauauauguaug

SEQ ID NO: 43195 - RNA, 22 nt, Artificial Sequence
  RPE65 RNA guide
aguacuauagaaaaagaacuac

SEQ ID NO: 43196 - RNA, 22 nt, Artificial Sequence
  RPE65 RNA guide
aguacugcccucaucccuaccc

SEQ ID NO: 43197 - RNA, 22 nt, Artificial Sequence
  RPE65 RNA guide
aguacuucugaagucugagagu

SEQ ID NO: 43198 - RNA, 22 nt, Artificial Sequence
  RPE65 RNA guide
agucgucauccuuugauaugau

SEQ ID NO: 43199 - RNA, 22 nt, Artificial Sequence
  RPE65 RNA guide
agucugagaguaauuuaacuau

SEQ ID NO: 43200 - RNA, 22 nt, Artificial Sequence
  RPE65 RNA guide
agugcucaauaaauguuugcua

SEQ ID NO: 43201 - RNA, 22 nt, Artificial Sequence
  RPE65 RNA guide
aguguacuaaauauguugcgcu

SEQ ID NO: 43202 - RNA, 22 nt, Artificial Sequence
  RPE65 RNA guide
aguguccaaguucucuucuaga

SEQ ID NO: 43203 - RNA, 22 nt, Artificial Sequence
  RPE65 RNA guide
agugucuauauugugagaaagu

SEQ ID NO: 43204 - RNA, 22 nt, Artificial Sequence
  RPE65 RNA guide
aguuaaauuacucucagacuuc

SEQ ID NO: 43205 - RNA, 22 nt, Artificial Sequence
  RPE65 RNA guide
aguuacuguauugugagaaaga

SEQ ID NO: 43206 - RNA, 22 nt, Artificial Sequence
  RPE65 RNA guide
aguuuaccaaucuguccucuuc

SEQ ID NO: 43207 - RNA, 22 nt, Artificial Sequence
  RPE65 RNA guide
aguuuugggaauuaagcgcaac

SEQ ID NO: 43208 - RNA, 22 nt, Artificial Sequence
  RPE65 RNA guide
auaacagauuuguuuguaguuu

SEQ ID NO: 43209 - RNA, 22 nt, Artificial Sequence
  RPE65 RNA guide
auaagcauguaugugugcauaa

SEQ ID NO: 43210 - RNA, 22 nt, Artificial Sequence
  RPE65 RNA guide
auaaggggccuaaugcccaagg

SEQ ID NO: 43211 - RNA, 22 nt, Artificial Sequence
  RPE65 RNA guide
auagaaagcaaguguccaaguu

SEQ ID NO: 43212 - RNA, 22 nt, Artificial Sequence
  RPE65 RNA guide
auagacacuuauuuucagaaga

SEQ ID NO: 43213 - RNA, 22 nt, Artificial Sequence
  RPE65 RNA guide
auagcauacauacauauaugag

SEQ ID NO: 43214 - RNA, 22 nt, Artificial Sequence
  RPE65 RNA guide
auaggguagggaugagggcagu

SEQ ID NO: 43215 - RNA, 22 nt, Artificial Sequence
  RPE65 RNA guide
auaguuaaauuacucucagacu

SEQ ID NO: 43216 - RNA, 22 nt, Artificial Sequence
  RPE65 RNA guide
auauagaaagcaaguguccaag

SEQ ID NO: 43217 - RNA, 22 nt, Artificial Sequence
  RPE65 RNA guide
auauagacacuuauuuucagaa

SEQ ID NO: 43218 - RNA, 22 nt, Artificial Sequence
  RPE65 RNA guide
auaucaaaggaugacgacuuga

SEQ ID NO: 43219 - RNA, 22 nt, Artificial Sequence
  RPE65 RNA guide
auaugagaguguacuaaauaug

SEQ ID NO: 43220 - RNA, 22 nt, Artificial Sequence
  RPE65 RNA guide
auaugaugcccuugggcauuag

SEQ ID NO: 43221 - RNA, 22 nt, Artificial Sequence
  RPE65 RNA guide
auauguauguaugcuauuaugc

SEQ ID NO: 43222 - RNA, 22 nt, Artificial Sequence
  RPE65 RNA guide
auauguugcgcuuaauucccaa

SEQ ID NO: 43223 - RNA, 22 nt, Artificial Sequence
  RPE65 RNA guide
auauucuagaagagaacuugga

SEQ ID NO: 43224 - RNA, 22 nt, Artificial Sequence
  RPE65 RNA guide
auauuuucaagucgucauccuu

SEQ ID NO: 43225 - RNA, 22 nt, Artificial Sequence
  RPE65 RNA guide
aucaaaggaugacgacuugaaa

SEQ ID NO: 43226 - RNA, 22 nt, Artificial Sequence
  RPE65 RNA guide
aucauaucaaaggaugacgacu

SEQ ID NO: 43227 - RNA, 22 nt, Artificial Sequence
  RPE65 RNA guide
aucccuacccuauaaggggccu

SEQ ID NO: 43228 - RNA, 22 nt, Artificial Sequence
  RPE65 RNA guide
auccuuugauaugaugcccuug

SEQ ID NO: 43229 - RNA, 22 nt, Artificial Sequence
  RPE65 RNA guide
aucuguccucuucugaaaauaa

SEQ ID NO: 43230 - RNA, 22 nt, Artificial Sequence
  RPE65 RNA guide
aucuuucucacaauacaguaac

SEQ ID NO: 43231 - RNA, 22 nt, Artificial Sequence
  RPE65 RNA guide
augacgacuugaaaauauagaa

SEQ ID NO: 43232 - RNA, 22 nt, Artificial Sequence
  RPE65 RNA guide
augagaguguacuaaauauguu

SEQ ID NO: 43233 - RNA, 22 nt, Artificial Sequence
  RPE65 RNA guide
augagggcaguacuucugaagu

SEQ ID NO: 43234 - RNA, 22 nt, Artificial Sequence
  RPE65 RNA guide
augaugcccuugggcauuaggc

SEQ ID NO: 43235 - RNA, 22 nt, Artificial Sequence
  RPE65 RNA guide
augcacaaaaugcuauucugac

SEQ ID NO: 43236 - RNA, 22 nt, Artificial Sequence
  RPE65 RNA guide
augcccaagggcaucauaucaa

SEQ ID NO: 43237 - RNA, 22 nt, Artificial Sequence
  RPE65 RNA guide
augcccuugggcauuaggcccc

SEQ ID NO: 43238 - RNA, 22 nt, Artificial Sequence
  RPE65 RNA guide
augcuauuaugcacacauacau

SEQ ID NO: 43239 - RNA, 22 nt, Artificial Sequence
  RPE65 RNA guide
augcuauucugacauucuuauc

SEQ ID NO: 43240 - RNA, 22 nt, Artificial Sequence
  RPE65 RNA guide
auguaugcuauuaugcacacau

SEQ ID NO: 43241 - RNA, 22 nt, Artificial Sequence
  RPE65 RNA guide
auguauguaugcuauuaugcac

SEQ ID NO: 43242 - RNA, 22 nt, Artificial Sequence
  RPE65 RNA guide
auguaugugugcauaauagcau

SEQ ID NO: 43243 - RNA, 22 nt, Artificial Sequence
  RPE65 RNA guide
augucagaauagcauuuugugc

SEQ ID NO: 43244 - RNA, 22 nt, Artificial Sequence
  RPE65 RNA guide
augugugcauaauagcauacau

SEQ ID NO: 43245 - RNA, 22 nt, Artificial Sequence
  RPE65 RNA guide
auguugcgcuuaauucccaaaa

SEQ ID NO: 43246 - RNA, 22 nt, Artificial Sequence
  RPE65 RNA guide
auuaagcgcaacauauuuagua

SEQ ID NO: 43247 - RNA, 22 nt, Artificial Sequence
  RPE65 RNA guide
auuacucucagacuucagaagu

SEQ ID NO: 43248 - RNA, 22 nt, Artificial Sequence
  RPE65 RNA guide
auuaggccccuuauaggguagg

SEQ ID NO: 43249 - RNA, 22 nt, Artificial Sequence
  RPE65 RNA guide
auucccaaaacuacaaacaaau

SEQ ID NO: 43250 - RNA, 22 nt, Artificial Sequence
  RPE65 RNA guide
auucuagaagagaacuuggaca

SEQ ID NO: 43251 - RNA, 22 nt, Artificial Sequence
  RPE65 RNA guide
auucuaggguacacucuuuuug

SEQ ID NO: 43252 - RNA, 22 nt, Artificial Sequence
  RPE65 RNA guide
auucugacauucuuaucuuucu

SEQ ID NO: 43253 - RNA, 22 nt, Artificial Sequence
  RPE65 RNA guide
auugagcacuuauucaugugcu

SEQ ID NO: 43254 - RNA, 22 nt, Artificial Sequence
  RPE65 RNA guide
auugugagaaagauaagaaugu

SEQ ID NO: 43255 - RNA, 22 nt, Artificial Sequence
  RPE65 RNA guide
auugugagaaaguuacuguauu

SEQ ID NO: 43256 - RNA, 22 nt, Artificial Sequence
  RPE65 RNA guide
auuuauugagcacuuauucaug

SEQ ID NO: 43257 - RNA, 22 nt, Artificial Sequence
  RPE65 RNA guide
auuuucaagucgucauccuuug

SEQ ID NO: 43258 - RNA, 22 nt, Artificial Sequence
  RPE65 RNA guide
auuuucagaagaggacagauug

SEQ ID NO: 43259 - RNA, 22 nt, Artificial Sequence
  RPE65 RNA guide
auuuugccuagcacaugaauaa

SEQ ID NO: 43260 - RNA, 22 nt, Artificial Sequence
  RPE65 RNA guide
caaaaugcuauucugacauucu

SEQ ID NO: 43261 - RNA, 22 nt, Artificial Sequence
  RPE65 RNA guide
caaacaaaucuguuaucucaua

SEQ ID NO: 43262 - RNA, 22 nt, Artificial Sequence
  RPE65 RNA guide
caaacuuagcaaacauuuauug

SEQ ID NO: 43263 - RNA, 22 nt, Artificial Sequence
  RPE65 RNA guide
caaaggaugacgacuugaaaau

SEQ ID NO: 43264 - RNA, 22 nt, Artificial Sequence
  RPE65 RNA guide
caagggcaucauaucaaaggau

SEQ ID NO: 43265 - RNA, 22 nt, Artificial Sequence
  RPE65 RNA guide
caagucgucauccuuugauaug

SEQ ID NO: 43266 - RNA, 22 nt, Artificial Sequence
  RPE65 RNA guide
caaguguccaaguucucuucua

SEQ ID NO: 43267 - RNA, 22 nt, Artificial Sequence
  RPE65 RNA guide
caaucuguccucuucugaaaau

SEQ ID NO: 43268 - RNA, 22 nt, Artificial Sequence
  RPE65 RNA guide
caauuaggauucaaacuuagca

SEQ ID NO: 43269 - RNA, 22 nt, Artificial Sequence
  RPE65 RNA guide
cacaaaaugcuauucugacauu

SEQ ID NO: 43270 - RNA, 22 nt, Artificial Sequence
  RPE65 RNA guide
cacaauacaguaacuuucucac

SEQ ID NO: 43271 - RNA, 22 nt, Artificial Sequence
  RPE65 RNA guide
cacaugaauaagugcucaauaa

SEQ ID NO: 43272 - RNA, 22 nt, Artificial Sequence
  RPE65 RNA guide
cacucucauauauguauguaug

SEQ ID NO: 43273 - RNA, 22 nt, Artificial Sequence
  RPE65 RNA guide
cacucuuuuugcuguaguucuu

SEQ ID NO: 43274 - RNA, 22 nt, Artificial Sequence
  RPE65 RNA guide
cacuuauucaugugcuaggcaa

SEQ ID NO: 43275 - RNA, 22 nt, Artificial Sequence
  RPE65 RNA guide
cacuuauuuucagaagaggaca

SEQ ID NO: 43276 - RNA, 22 nt, Artificial Sequence
  RPE65 RNA guide
cacuugcuuucuauauuuucaa

SEQ ID NO: 43277 - RNA, 22 nt, Artificial Sequence
  RPE65 RNA guide
cagaagaggacagauugguaaa

SEQ ID NO: 43278 - RNA, 22 nt, Artificial Sequence
  RPE65 RNA guide
cagaaguacugcccucaucccu

SEQ ID NO: 43279 - RNA, 22 nt, Artificial Sequence
  RPE65 RNA guide
cagaauagcauuuugugcauag

SEQ ID NO: 43280 - RNA, 22 nt, Artificial Sequence
  RPE65 RNA guide
cagacuucagaaguacugcccu

SEQ ID NO: 43281 - RNA, 22 nt, Artificial Sequence
  RPE65 RNA guide
cagauuuguuuguaguuuuggg

SEQ ID NO: 43282 - RNA, 22 nt, Artificial Sequence
  RPE65 RNA guide
cagcaaaaagaguguacccuag

SEQ ID NO: 43283 - RNA, 22 nt, Artificial Sequence
  RPE65 RNA guide
caguaacuuucucacaauauag

SEQ ID NO: 43284 - RNA, 22 nt, Artificial Sequence
  RPE65 RNA guide
caguacuucugaagucugagag

SEQ ID NO: 43285 - RNA, 22 nt, Artificial Sequence
  RPE65 RNA guide
cauacauacauauaugagagug

SEQ ID NO: 43286 - RNA, 22 nt, Artificial Sequence
  RPE65 RNA guide
cauaguuaaauuacucucagac

SEQ ID NO: 43287 - RNA, 22 nt, Artificial Sequence
  RPE65 RNA guide
cauaucaaaggaugacgacuug

SEQ ID NO: 43288 - RNA, 22 nt, Artificial Sequence
  RPE65 RNA guide
caucauaucaaaggaugacgac

SEQ ID NO: 43289 - RNA, 22 nt, Artificial Sequence
  RPE65 RNA guide
caucccuacccuauaaggggcc

SEQ ID NO: 43290 - RNA, 22 nt, Artificial Sequence
  RPE65 RNA guide
cauccuuugauaugaugcccuu

SEQ ID NO: 43291 - RNA, 22 nt, Artificial Sequence
  RPE65 RNA guide
cauguaugugugcauaauagca

SEQ ID NO: 43292 - RNA, 22 nt, Artificial Sequence
  RPE65 RNA guide
cauuaggccccuuauaggguag

SEQ ID NO: 43293 - RNA, 22 nt, Artificial Sequence
  RPE65 RNA guide
cauucuuaucuuucucacaaua

SEQ ID NO: 43294 - RNA, 22 nt, Artificial Sequence
  RPE65 RNA guide
cauuuauugagcacuuauucau

SEQ ID NO: 43295 - RNA, 22 nt, Artificial Sequence
  RPE65 RNA guide
ccaagggcaucauaucaaagga

SEQ ID NO: 43296 - RNA, 22 nt, Artificial Sequence
  RPE65 RNA guide
ccaaucuguccucuucugaaaa

SEQ ID NO: 43297 - RNA, 22 nt, Artificial Sequence
  RPE65 RNA guide
cccaaaacuacaaacaaaucug

SEQ ID NO: 43298 - RNA, 22 nt, Artificial Sequence
  RPE65 RNA guide
cccaagggcaucauaucaaagg

SEQ ID NO: 43299 - RNA, 22 nt, Artificial Sequence
  RPE65 RNA guide
ccccuuauaggguagggaugag

SEQ ID NO: 43300 - RNA, 22 nt, Artificial Sequence
  RPE65 RNA guide
cccuacccuauaaggggccuaa

SEQ ID NO: 43301 - RNA, 22 nt, Artificial Sequence
  RPE65 RNA guide
cccuauaaggggccuaaugccc

SEQ ID NO: 43302 - RNA, 22 nt, Artificial Sequence
  RPE65 RNA guide
cccucaucccuacccuauaagg

SEQ ID NO: 43303 - RNA, 22 nt, Artificial Sequence
  RPE65 RNA guide
cccuuauaggguagggaugagg

SEQ ID NO: 43304 - RNA, 22 nt, Artificial Sequence
  RPE65 RNA guide
cccuugggcauuaggccccuua

SEQ ID NO: 43305 - RNA, 22 nt, Artificial Sequence
  RPE65 RNA guide
ccuaaugcccaagggcaucaua

SEQ ID NO: 43306 - RNA, 22 nt, Artificial Sequence
  RPE65 RNA guide
ccuacccuauaaggggccuaau

SEQ ID NO: 43307 - RNA, 22 nt, Artificial Sequence
  RPE65 RNA guide
ccuagcacaugaauaagugcuc

SEQ ID NO: 43308 - RNA, 22 nt, Artificial Sequence
  RPE65 RNA guide
ccuauaaggggccuaaugccca

SEQ ID NO: 43309 - RNA, 22 nt, Artificial Sequence
  RPE65 RNA guide
ccucaucccuacccuauaaggg

SEQ ID NO: 43310 - RNA, 22 nt, Artificial Sequence
  RPE65 RNA guide
ccucuucugaaaauaagugucu

SEQ ID NO: 43311 - RNA, 22 nt, Artificial Sequence
  RPE65 RNA guide
ccuuauaggguagggaugaggg

SEQ ID NO: 43312 - RNA, 22 nt, Artificial Sequence
  RPE65 RNA guide
ccuugggcauuaggccccuuau

SEQ ID NO: 43313 - RNA, 22 nt, Artificial Sequence
  RPE65 RNA guide
ccuuugauaugaugcccuuggg

SEQ ID NO: 43314 - RNA, 22 nt, Artificial Sequence
  RPE65 RNA guide
cgacuugaaaauauagaaagca

SEQ ID NO: 43315 - RNA, 22 nt, Artificial Sequence
  RPE65 RNA guide
cgcaacauauuuaguacacucu

SEQ ID NO: 43316 - RNA, 22 nt, Artificial Sequence
  RPE65 RNA guide
cgcuuaauucccaaaacuacaa

SEQ ID NO: 43317 - RNA, 22 nt, Artificial Sequence
  RPE65 RNA guide
cgucauccuuugauaugaugcc

SEQ ID NO: 43318 - RNA, 22 nt, Artificial Sequence
  RPE65 RNA guide
cuaaauauguugcgcuuaauuc

SEQ ID NO: 43319 - RNA, 22 nt, Artificial Sequence
  RPE65 RNA guide
cuaaugcccaagggcaucauau

SEQ ID NO: 43320 - RNA, 22 nt, Artificial Sequence
  RPE65 RNA guide
cuacagcaaaaagaguguaccc

SEQ ID NO: 43321 - RNA, 22 nt, Artificial Sequence
  RPE65 RNA guide
cuacccuauaaggggccuaaug

SEQ ID NO: 43322 - RNA, 22 nt, Artificial Sequence
  RPE65 RNA guide
cuagaagagaacuuggacacuu

SEQ ID NO: 43323 - RNA, 22 nt, Artificial Sequence
  RPE65 RNA guide
cuagcacaugaauaagugcuca

SEQ ID NO: 43324 - RNA, 22 nt, Artificial Sequence
  RPE65 RNA guide
cuaggguacacucuuuuugcug

SEQ ID NO: 43325 - RNA, 22 nt, Artificial Sequence
  RPE65 RNA guide
cuauaaggggccuaaugcccaa

SEQ ID NO: 43326 - RNA, 22 nt, Artificial Sequence
  RPE65 RNA guide
cuauaguacuucuaugagauaa

SEQ ID NO: 43327 - RNA, 22 nt, Artificial Sequence
  RPE65 RNA guide
cuauauuuucaagucgucaucc

SEQ ID NO: 43328 - RNA, 22 nt, Artificial Sequence
  RPE65 RNA guide
cuaugagauaacagauuuguuu

SEQ ID NO: 43329 - RNA, 22 nt, Artificial Sequence
  RPE65 RNA guide
cuaugcacaaaaugcuauucug

SEQ ID NO: 43330 - RNA, 22 nt, Artificial Sequence
  RPE65 RNA guide
cuauuaugcacacauacaugcu

SEQ ID NO: 43331 - RNA, 22 nt, Artificial Sequence
  RPE65 RNA guide
cuauucugacauucuuaucuuu

SEQ ID NO: 43332 - RNA, 22 nt, Artificial Sequence
  RPE65 RNA guide
cucacaauacaguaacuuucuc

SEQ ID NO: 43333 - RNA, 22 nt, Artificial Sequence
  RPE65 RNA guide
cucacaauauagacacuuauuu

SEQ ID NO: 43334 - RNA, 22 nt, Artificial Sequence
  RPE65 RNA guide
cucagacuucagaaguacugcc

SEQ ID NO: 43335 - RNA, 22 nt, Artificial Sequence
  RPE65 RNA guide
cucaucccuacccuauaagggg

SEQ ID NO: 43336 - RNA, 22 nt, Artificial Sequence
  RPE65 RNA guide
cucucagacuucagaaguacug

SEQ ID NO: 43337 - RNA, 22 nt, Artificial Sequence
  RPE65 RNA guide
cucuuuuugcuguaguucuuuu

SEQ ID NO: 43338 - RNA, 22 nt, Artificial Sequence
  RPE65 RNA guide
cugaaaauaagugucuauauug

SEQ ID NO: 43339 - RNA, 22 nt, Artificial Sequence
  RPE65 RNA guide
cugaagucugagaguaauuuaa

SEQ ID NO: 43340 - RNA, 22 nt, Artificial Sequence
  RPE65 RNA guide
cugacauucuuaucuuucucac

SEQ ID NO: 43341 - RNA, 22 nt, Artificial Sequence
  RPE65 RNA guide
cugagaguaauuuaacuaugca

SEQ ID NO: 43342 - RNA, 22 nt, Artificial Sequence
  RPE65 RNA guide
cugcccucaucccuacccuaua

SEQ ID NO: 43343 - RNA, 22 nt, Artificial Sequence
  RPE65 RNA guide
cuguaguucuuuuucuauagua

SEQ ID NO: 43344 - RNA, 22 nt, Artificial Sequence
  RPE65 RNA guide
cuguauugugagaaagauaaga

SEQ ID NO: 43345 - RNA, 22 nt, Artificial Sequence
  RPE65 RNA guide
cuguccucuucugaaaauaagu

SEQ ID NO: 43346 - RNA, 22 nt, Artificial Sequence
  RPE65 RNA guide
cuuagcaaacauuuauugagca

SEQ ID NO: 43347 - RNA, 22 nt, Artificial Sequence
  RPE65 RNA guide
cuuauaggguagggaugagggc

SEQ ID NO: 43348 - RNA, 22 nt, Artificial Sequence
  RPE65 RNA guide
cuuaucuuucucacaauacagu

SEQ ID NO: 43349 - RNA, 22 nt, Artificial Sequence
  RPE65 RNA guide
cuuauucaugugcuaggcaaaa

SEQ ID NO: 43350 - RNA, 22 nt, Artificial Sequence
  RPE65 RNA guide
cuuauuuucagaagaggacaga

SEQ ID NO: 43351 - RNA, 22 nt, Artificial Sequence
  RPE65 RNA guide
cuucagaaguacugcccucauc

SEQ ID NO: 43352 - RNA, 22 nt, Artificial Sequence
  RPE65 RNA guide
cuucugaagucugagaguaauu

SEQ ID NO: 43353 - RNA, 22 nt, Artificial Sequence
  RPE65 RNA guide
cuugaaaauauagaaagcaagu

SEQ ID NO: 43354 - RNA, 22 nt, Artificial Sequence
  RPE65 RNA guide
cuugcuuucuauauuuucaagu

SEQ ID NO: 43355 - RNA, 22 nt, Artificial Sequence
  RPE65 RNA guide
cuuggacacuugcuuucuauau

SEQ ID NO: 43356 - RNA, 22 nt, Artificial Sequence
  RPE65 RNA guide
cuugggcauuaggccccuuaua

SEQ ID NO: 43357 - RNA, 22 nt, Artificial Sequence
  RPE65 RNA guide
cuuucuauauuuucaagucguc

SEQ ID NO: 43358 - RNA, 22 nt, Artificial Sequence
  RPE65 RNA guide
cuuucucacaauacaguaacuu

SEQ ID NO: 43359 - RNA, 22 nt, Artificial Sequence
  RPE65 RNA guide
cuuugauaugaugcccuugggc

SEQ ID NO: 43360 - RNA, 22 nt, Artificial Sequence
  RPE65 RNA guide
gaaaaagaacuacagcaaaaag

SEQ ID NO: 43361 - RNA, 22 nt, Artificial Sequence
  RPE65 RNA guide
gaaaauauagaaagcaaguguc

SEQ ID NO: 43362 - RNA, 22 nt, Artificial Sequence
  RPE65 RNA guide
gaaagauaagaaugucagaaua

SEQ ID NO: 43363 - RNA, 22 nt, Artificial Sequence
  RPE65 RNA guide
gaaagcaaguguccaaguucuc

SEQ ID NO: 43364 - RNA, 22 nt, Artificial Sequence
  RPE65 RNA guide
gaaaguuacuguauugugagaa

SEQ ID NO: 43365 - RNA, 22 nt, Artificial Sequence
  RPE65 RNA guide
gaacuacagcaaaaagagugua

SEQ ID NO: 43366 - RNA, 22 nt, Artificial Sequence
  RPE65 RNA guide
gaacuuggacacuugcuuucua

SEQ ID NO: 43367 - RNA, 22 nt, Artificial Sequence
  RPE65 RNA guide
gaagagaacuuggacacuugcu

SEQ ID NO: 43368 - RNA, 22 nt, Artificial Sequence
  RPE65 RNA guide
gaaguacuauagaaaaagaacu

SEQ ID NO: 43369 - RNA, 22 nt, Artificial Sequence
  RPE65 RNA guide
gaaguacugcccucaucccuac

SEQ ID NO: 43370 - RNA, 22 nt, Artificial Sequence
  RPE65 RNA guide
gaagucugagaguaauuuaacu

SEQ ID NO: 43371 - RNA, 22 nt, Artificial Sequence
  RPE65 RNA guide
gaauaagugcucaauaaauguu

SEQ ID NO: 43372 - RNA, 22 nt, Artificial Sequence
  RPE65 RNA guide
gaaugucagaauagcauuuugu

SEQ ID NO: 43373 - RNA, 22 nt, Artificial Sequence
  RPE65 RNA guide
gaauuaagcgcaacauauuuag

SEQ ID NO: 43374 - RNA, 22 nt, Artificial Sequence
  RPE65 RNA guide
gacacuuauuuucagaagagga

SEQ ID NO: 43375 - RNA, 22 nt, Artificial Sequence
  RPE65 RNA guide
gacacuugcuuucuauauuuuc

SEQ ID NO: 43376 - RNA, 22 nt, Artificial Sequence
  RPE65 RNA guide
gacauucuuaucuuucucacaa

SEQ ID NO: 43377 - RNA, 22 nt, Artificial Sequence
  RPE65 RNA guide
gacgacuugaaaauauagaaag

SEQ ID NO: 43378 - RNA, 22 nt, Artificial Sequence
  RPE65 RNA guide
gacuucagaaguacugcccuca

SEQ ID NO: 43379 - RNA, 22 nt, Artificial Sequence
  RPE65 RNA guide
gacuugaaaauauagaaagcaa

SEQ ID NO: 43380 - RNA, 22 nt, Artificial Sequence
  RPE65 RNA guide
gagaaagauaagaaugucagaa

SEQ ID NO: 43381 - RNA, 22 nt, Artificial Sequence
  RPE65 RNA guide
gagaaaguuacuguauugugag

SEQ ID NO: 43382 - RNA, 22 nt, Artificial Sequence
  RPE65 RNA guide
gagaacuuggacacuugcuuuc

SEQ ID NO: 43383 - RNA, 22 nt, Artificial Sequence
  RPE65 RNA guide
gagaguguacuaaauauguugc

SEQ ID NO: 43384 - RNA, 22 nt, Artificial Sequence
  RPE65 RNA guide
gagcacuuauucaugugcuagg

SEQ ID NO: 43385 - RNA, 22 nt, Artificial Sequence
  RPE65 RNA guide
gagggcaguacuucugaagucu

SEQ ID NO: 43386 - RNA, 22 nt, Artificial Sequence
  RPE65 RNA guide
gaguaauuuaacuaugcacaaa

SEQ ID NO: 43387 - RNA, 22 nt, Artificial Sequence
  RPE65 RNA guide
gaguguacuaaauauguugcgc

SEQ ID NO: 43388 - RNA, 22 nt, Artificial Sequence
  RPE65 RNA guide
gaguuuaccaaucuguccucuu

SEQ ID NO: 43389 - RNA, 22 nt, Artificial Sequence
  RPE65 RNA guide
gauaacagauuuguuuguaguu

SEQ ID NO: 43390 - RNA, 22 nt, Artificial Sequence
  RPE65 RNA guide
gauaagaaugucagaauagcau

SEQ ID NO: 43391 - RNA, 22 nt, Artificial Sequence
  RPE65 RNA guide
gauaugaugcccuugggcauua

SEQ ID NO: 43392 - RNA, 22 nt, Artificial Sequence
  RPE65 RNA guide
gaugacgacuugaaaauauaga

SEQ ID NO: 43393 - RNA, 22 nt, Artificial Sequence
  RPE65 RNA guide
gaugagggcaguacuucugaag

SEQ ID NO: 43394 - RNA, 22 nt, Artificial Sequence
  RPE65 RNA guide
gaugcccuugggcauuaggccc

SEQ ID NO: 43395 - RNA, 22 nt, Artificial Sequence
  RPE65 RNA guide
gcaaacauuuauugagcacuua

SEQ ID NO: 43396 - RNA, 22 nt, Artificial Sequence
  RPE65 RNA guide
gcaacauauuuaguacacucuc

SEQ ID NO: 43397 - RNA, 22 nt, Artificial Sequence
  RPE65 RNA guide
gcaaguguccaaguucucuucu

SEQ ID NO: 43398 - RNA, 22 nt, Artificial Sequence
  RPE65 RNA guide
gcacaaaaugcuauucugacau

SEQ ID NO: 43399 - RNA, 22 nt, Artificial Sequence
  RPE65 RNA guide
gcacaugaauaagugcucaaua

SEQ ID NO: 43400 - RNA, 22 nt, Artificial Sequence
  RPE65 RNA guide
gcacuuauucaugugcuaggca

SEQ ID NO: 43401 - RNA, 22 nt, Artificial Sequence
  RPE65 RNA guide
gcaguacuucugaagucugaga

SEQ ID NO: 43402 - RNA, 22 nt, Artificial Sequence
  RPE65 RNA guide
gcauacauacauauaugagagu

SEQ ID NO: 43403 - RNA, 22 nt, Artificial Sequence
  RPE65 RNA guide
gcauaguuaaauuacucucaga

SEQ ID NO: 43404 - RNA, 22 nt, Artificial Sequence
  RPE65 RNA guide
gcaucauaucaaaggaugacga

SEQ ID NO: 43405 - RNA, 22 nt, Artificial Sequence
  RPE65 RNA guide
gcauguaugugugcauaauagc

SEQ ID NO: 43406 - RNA, 22 nt, Artificial Sequence
  RPE65 RNA guide
gcauuaggccccuuauagggua

SEQ ID NO: 43407 - RNA, 22 nt, Artificial Sequence
  RPE65 RNA guide
gcauuuugugcauaguuaaauu

SEQ ID NO: 43408 - RNA, 22 nt, Artificial Sequence
  RPE65 RNA guide
gcccaagggcaucauaucaaag

SEQ ID NO: 43409 - RNA, 22 nt, Artificial Sequence
  RPE65 RNA guide
gccccuuauaggguagggauga

SEQ ID NO: 43410 - RNA, 22 nt, Artificial Sequence
  RPE65 RNA guide
gcccucaucccuacccuauaag

SEQ ID NO: 43411 - RNA, 22 nt, Artificial Sequence
  RPE65 RNA guide
gcccuugggcauuaggccccuu

SEQ ID NO: 43412 - RNA, 22 nt, Artificial Sequence
  RPE65 RNA guide
gccuaaugcccaagggcaucau

SEQ ID NO: 43413 - RNA, 22 nt, Artificial Sequence
  RPE65 RNA guide
gccuagcacaugaauaagugcu

SEQ ID NO: 43414 - RNA, 22 nt, Artificial Sequence
  RPE65 RNA guide
gcgcaacauauuuaguacacuc

SEQ ID NO: 43415 - RNA, 22 nt, Artificial Sequence
  RPE65 RNA guide
gcgcuuaauucccaaaacuaca

SEQ ID NO: 43416 - RNA, 22 nt, Artificial Sequence
  RPE65 RNA guide
gcuauuaugcacacauacaugc

SEQ ID NO: 43417 - RNA, 22 nt, Artificial Sequence
  RPE65 RNA guide
gcuauucugacauucuuaucuu

SEQ ID NO: 43418 - RNA, 22 nt, Artificial Sequence
  RPE65 RNA guide
gcucaauaaauguuugcuaagu

SEQ ID NO: 43419 - RNA, 22 nt, Artificial Sequence
  RPE65 RNA guide
gcuguaguucuuuuucuauagu

SEQ ID NO: 43420 - RNA, 22 nt, Artificial Sequence
  RPE65 RNA guide
gcuuaauucccaaaacuacaaa

SEQ ID NO: 43421 - RNA, 22 nt, Artificial Sequence
  RPE65 RNA guide
gcuuucuauauuuucaagucgu

SEQ ID NO: 43422 - RNA, 22 nt, Artificial Sequence
  RPE65 RNA guide
ggaauuaagcgcaacauauuua

SEQ ID NO: 43423 - RNA, 22 nt, Artificial Sequence
  RPE65 RNA guide
ggacacuugcuuucuauauuuu

SEQ ID NO: 43424 - RNA, 22 nt, Artificial Sequence
  RPE65 RNA guide
ggaugacgacuugaaaauauag

SEQ ID NO: 43425 - RNA, 22 nt, Artificial Sequence
  RPE65 RNA guide
ggaugagggcaguacuucugaa

SEQ ID NO: 43426 - RNA, 22 nt, Artificial Sequence
  RPE65 RNA guide
ggcaguacuucugaagucugag

SEQ ID NO: 43427 - RNA, 22 nt, Artificial Sequence
  RPE65 RNA guide
ggcaucauaucaaaggaugacg

SEQ ID NO: 43428 - RNA, 22 nt, Artificial Sequence
  RPE65 RNA guide
ggcauuaggccccuuauagggu

SEQ ID NO: 43429 - RNA, 22 nt, Artificial Sequence
  RPE65 RNA guide
ggccccuuauaggguagggaug

SEQ ID NO: 43430 - RNA, 22 nt, Artificial Sequence
  RPE65 RNA guide
ggccuaaugcccaagggcauca

SEQ ID NO: 43431 - RNA, 22 nt, Artificial Sequence
  RPE65 RNA guide
gggaauuaagcgcaacauauuu

SEQ ID NO: 43432 - RNA, 22 nt, Artificial Sequence
  RPE65 RNA guide
gggaugagggcaguacuucuga

SEQ ID NO: 43433 - RNA, 22 nt, Artificial Sequence
  RPE65 RNA guide
gggcaguacuucugaagucuga

SEQ ID NO: 43434 - RNA, 22 nt, Artificial Sequence
  RPE65 RNA guide
gggcaucauaucaaaggaugac

SEQ ID NO: 43435 - RNA, 22 nt, Artificial Sequence
  RPE65 RNA guide
gggcauuaggccccuuauaggg

SEQ ID NO: 43436 - RNA, 22 nt, Artificial Sequence
  RPE65 RNA guide
gggccuaaugcccaagggcauc

SEQ ID NO: 43437 - RNA, 22 nt, Artificial Sequence
  RPE65 RNA guide
ggggccuaaugcccaagggcau

SEQ ID NO: 43438 - RNA, 22 nt, Artificial Sequence
  RPE65 RNA guide
ggguacacucuuuuugcuguag

SEQ ID NO: 43439 - RNA, 22 nt, Artificial Sequence
  RPE65 RNA guide
ggguagggaugagggcaguacu

SEQ ID NO: 43440 - RNA, 22 nt, Artificial Sequence
  RPE65 RNA guide
gguacacucuuuuugcuguagu

SEQ ID NO: 43441 - RNA, 22 nt, Artificial Sequence
  RPE65 RNA guide
gguagggaugagggcaguacuu

SEQ ID NO: 43442 - RNA, 22 nt, Artificial Sequence
  RPE65 RNA guide
guaacuuucucacaauauagac

SEQ ID NO: 43443 - RNA, 22 nt, Artificial Sequence
  RPE65 RNA guide
guacacucucauauauguaugu

SEQ ID NO: 43444 - RNA, 22 nt, Artificial Sequence
  RPE65 RNA guide
guacacucuuuuugcuguaguu

SEQ ID NO: 43445 - RNA, 22 nt, Artificial Sequence
  RPE65 RNA guide
guacuaaauauguugcgcuuaa

SEQ ID NO: 43446 - RNA, 22 nt, Artificial Sequence
  RPE65 RNA guide
guacuauagaaaaagaacuaca

SEQ ID NO: 43447 - RNA, 22 nt, Artificial Sequence
  RPE65 RNA guide
guacugcccucaucccuacccu

SEQ ID NO: 43448 - RNA, 22 nt, Artificial Sequence
  RPE65 RNA guide
guacuucugaagucugagagua

SEQ ID NO: 43449 - RNA, 22 nt, Artificial Sequence
  RPE65 RNA guide
guagggaugagggcaguacuuc

SEQ ID NO: 43450 - RNA, 22 nt, Artificial Sequence
  RPE65 RNA guide
guaguuuugggaauuaagcgca

SEQ ID NO: 43451 - RNA, 22 nt, Artificial Sequence
  RPE65 RNA guide
guaugcuauuaugcacacauac

SEQ ID NO: 43452 - RNA, 22 nt, Artificial Sequence
  RPE65 RNA guide
guauguaugcuauuaugcacac

SEQ ID NO: 43453 - RNA, 22 nt, Artificial Sequence
  RPE65 RNA guide
guaugugugcauaauagcauac

SEQ ID NO: 43454 - RNA, 22 nt, Artificial Sequence
  RPE65 RNA guide
guauugugagaaagauaagaau

SEQ ID NO: 43455 - RNA, 22 nt, Artificial Sequence
  RPE65 RNA guide
gucagaauagcauuuugugcau

SEQ ID NO: 43456 - RNA, 22 nt, Artificial Sequence
  RPE65 RNA guide
gucauccuuugauaugaugccc

SEQ ID NO: 43457 - RNA, 22 nt, Artificial Sequence
  RPE65 RNA guide
guccaaguucucuucuagaaua

SEQ ID NO: 43458 - RNA, 22 nt, Artificial Sequence
  RPE65 RNA guide
guccucuucugaaaauaagugu

SEQ ID NO: 43459 - RNA, 22 nt, Artificial Sequence
  RPE65 RNA guide
gucgucauccuuugauaugaug

SEQ ID NO: 43460 - RNA, 22 nt, Artificial Sequence
  RPE65 RNA guide
gucuauauugugagaaaguuac

SEQ ID NO: 43461 - RNA, 22 nt, Artificial Sequence
  RPE65 RNA guide
gucugagaguaauuuaacuaug

SEQ ID NO: 43462 - RNA, 22 nt, Artificial Sequence
  RPE65 RNA guide
gugagaaagauaagaaugucag

SEQ ID NO: 43463 - RNA, 22 nt, Artificial Sequence
  RPE65 RNA guide
gugagaaaguuacuguauugug

SEQ ID NO: 43464 - RNA, 22 nt, Artificial Sequence
  RPE65 RNA guide
gugaguuuaccaaucuguccuc

SEQ ID NO: 43465 - RNA, 22 nt, Artificial Sequence
  RPE65 RNA guide
gugcauaguuaaauuacucuca

SEQ ID NO: 43466 - RNA, 22 nt, Artificial Sequence
  RPE65 RNA guide
gugcucaauaaauguuugcuaa

SEQ ID NO: 43467 - RNA, 22 nt, Artificial Sequence
  RPE65 RNA guide
guguacuaaauauguugcgcuu

SEQ ID NO: 43468 - RNA, 22 nt, Artificial Sequence
  RPE65 RNA guide
guguccaaguucucuucuagaa

SEQ ID NO: 43469 - RNA, 22 nt, Artificial Sequence
  RPE65 RNA guide
gugucuauauugugagaaaguu

SEQ ID NO: 43470 - RNA, 22 nt, Artificial Sequence
  RPE65 RNA guide
gugugcauaauagcauacauac

SEQ ID NO: 43471 - RNA, 22 nt, Artificial Sequence
  RPE65 RNA guide
guuaaauuacucucagacuuca

SEQ ID NO: 43472 - RNA, 22 nt, Artificial Sequence
  RPE65 RNA guide
guuacuguauugugagaaagau

SEQ ID NO: 43473 - RNA, 22 nt, Artificial Sequence
  RPE65 RNA guide
guugcgcuuaauucccaaaacu

SEQ ID NO: 43474 - RNA, 22 nt, Artificial Sequence
  RPE65 RNA guide
guuuaccaaucuguccucuucu

SEQ ID NO: 43475 - RNA, 22 nt, Artificial Sequence
  RPE65 RNA guide
guuugcuaaguuugaauccuaa

SEQ ID NO: 43476 - RNA, 22 nt, Artificial Sequence
  RPE65 RNA guide
guuuguaguuuugggaauuaag

SEQ ID NO: 43477 - RNA, 22 nt, Artificial Sequence
  RPE65 RNA guide
guuuugggaauuaagcgcaaca

SEQ ID NO: 43478 - RNA, 22 nt, Artificial Sequence
  RPE65 RNA guide
uaaauauguugcgcuuaauucc

SEQ ID NO: 43479 - RNA, 22 nt, Artificial Sequence
  RPE65 RNA guide
uaaauuacucucagacuucaga

SEQ ID NO: 43480 - RNA, 22 nt, Artificial Sequence
  RPE65 RNA guide
uaacagauuuguuuguaguuuu

SEQ ID NO: 43481 - RNA, 22 nt, Artificial Sequence
  RPE65 RNA guide
uaacuaugcacaaaaugcuauu

SEQ ID NO: 43482 - RNA, 22 nt, Artificial Sequence
  RPE65 RNA guide
uaagaaugucagaauagcauuu

SEQ ID NO: 43483 - RNA, 22 nt, Artificial Sequence
  RPE65 RNA guide
uaagcauguaugugugcauaau

SEQ ID NO: 43484 - RNA, 22 nt, Artificial Sequence
  RPE65 RNA guide
uaagcgcaacauauuuaguaca

SEQ ID NO: 43485 - RNA, 22 nt, Artificial Sequence
  RPE65 RNA guide
uaaggggccuaaugcccaaggg

SEQ ID NO: 43486 - RNA, 22 nt, Artificial Sequence
  RPE65 RNA guide
uaagugcucaauaaauguuugc

SEQ ID NO: 43487 - RNA, 22 nt, Artificial Sequence
  RPE65 RNA guide
uaauauucuagaagagaacuug

SEQ ID NO: 43488 - RNA, 22 nt, Artificial Sequence
  RPE65 RNA guide
uaaugcccaagggcaucauauc

SEQ ID NO: 43489 - RNA, 22 nt, Artificial Sequence
  RPE65 RNA guide
uaauuuugccuagcacaugaau

SEQ ID NO: 43490 - RNA, 22 nt, Artificial Sequence
  RPE65 RNA guide
uacacucucauauauguaugua

SEQ ID NO: 43491 - RNA, 22 nt, Artificial Sequence
  RPE65 RNA guide
uacacucuuuuugcuguaguuc

SEQ ID NO: 43492 - RNA, 22 nt, Artificial Sequence
  RPE65 RNA guide
uacagcaaaaagaguguacccu

SEQ ID NO: 43493 - RNA, 22 nt, Artificial Sequence
  RPE65 RNA guide
uacaguaacuuucucacaauau

SEQ ID NO: 43494 - RNA, 22 nt, Artificial Sequence
  RPE65 RNA guide
uaccaaucuguccucuucugaa

SEQ ID NO: 43495 - RNA, 22 nt, Artificial Sequence
  RPE65 RNA guide
uacccuauaaggggccuaaugc

SEQ ID NO: 43496 - RNA, 22 nt, Artificial Sequence
  RPE65 RNA guide
uacuaaauauguugcgcuuaau

SEQ ID NO: 43497 - RNA, 22 nt, Artificial Sequence
  RPE65 RNA guide
uacucucagacuucagaaguac

SEQ ID NO: 43498 - RNA, 22 nt, Artificial Sequence
  RPE65 RNA guide
uacugcccucaucccuacccua

SEQ ID NO: 43499 - RNA, 22 nt, Artificial Sequence
  RPE65 RNA guide
uacuucugaagucugagaguaa

SEQ ID NO: 43500 - RNA, 22 nt, Artificial Sequence
  RPE65 RNA guide
uagaaaaagaacuacagcaaaa

SEQ ID NO: 43501 - RNA, 22 nt, Artificial Sequence
  RPE65 RNA guide
uagaaagcaaguguccaaguuc

SEQ ID NO: 43502 - RNA, 22 nt, Artificial Sequence
  RPE65 RNA guide
uagaagagaacuuggacacuug

SEQ ID NO: 43503 - RNA, 22 nt, Artificial Sequence
  RPE65 RNA guide
uagacacuuauuuucagaagag

SEQ ID NO: 43504 - RNA, 22 nt, Artificial Sequence
  RPE65 RNA guide
uagcacaugaauaagugcucaa

SEQ ID NO: 43505 - RNA, 22 nt, Artificial Sequence
  RPE65 RNA guide
uagcauacauacauauaugaga

SEQ ID NO: 43506 - RNA, 22 nt, Artificial Sequence
  RPE65 RNA guide
uaggccccuuauaggguaggga

SEQ ID NO: 43507 - RNA, 22 nt, Artificial Sequence
  RPE65 RNA guide
uagggaugagggcaguacuucu

SEQ ID NO: 43508 - RNA, 22 nt, Artificial Sequence
  RPE65 RNA guide
uaggguacacucuuuuugcugu

SEQ ID NO: 43509 - RNA, 22 nt, Artificial Sequence
  RPE65 RNA guide
uaggguagggaugagggcagua

SEQ ID NO: 43510 - RNA, 22 nt, Artificial Sequence
  RPE65 RNA guide
uaguuaaauuacucucagacuu

SEQ ID NO: 43511 - RNA, 22 nt, Artificial Sequence
  RPE65 RNA guide
uaguuuugggaauuaagcgcaa

SEQ ID NO: 43512 - RNA, 22 nt, Artificial Sequence
  RPE65 RNA guide
uauaaggggccuaaugcccaag

SEQ ID NO: 43513 - RNA, 22 nt, Artificial Sequence
  RPE65 RNA guide
uauagaaagcaaguguccaagu

SEQ ID NO: 43514 - RNA, 22 nt, Artificial Sequence
  RPE65 RNA guide
uauagacacuuauuuucagaag

SEQ ID NO: 43515 - RNA, 22 nt, Artificial Sequence
  RPE65 RNA guide
uauaggguagggaugagggcag

SEQ ID NO: 43516 - RNA, 22 nt, Artificial Sequence
  RPE65 RNA guide
uauauuuucaagucgucauccu

SEQ ID NO: 43517 - RNA, 22 nt, Artificial Sequence
  RPE65 RNA guide
uaucaaaggaugacgacuugaa

SEQ ID NO: 43518 - RNA, 22 nt, Artificial Sequence
  RPE65 RNA guide
uaugagaguguacuaaauaugu

SEQ ID NO: 43519 - RNA, 22 nt, Artificial Sequence
  RPE65 RNA guide
uaugaugcccuugggcauuagg

SEQ ID NO: 43520 - RNA, 22 nt, Artificial Sequence
  RPE65 RNA guide
uaugcacaaaaugcuauucuga

SEQ ID NO: 43521 - RNA, 22 nt, Artificial Sequence
  RPE65 RNA guide
uaugcuauuaugcacacauaca

SEQ ID NO: 43522 - RNA, 22 nt, Artificial Sequence
  RPE65 RNA guide
uauguaugcuauuaugcacaca

SEQ ID NO: 43523 - RNA, 22 nt, Artificial Sequence
  RPE65 RNA guide
uauguauguaugcuauuaugca

SEQ ID NO: 43524 - RNA, 22 nt, Artificial Sequence
  RPE65 RNA guide
uaugugugcauaauagcauaca

SEQ ID NO: 43525 - RNA, 22 nt, Artificial Sequence
  RPE65 RNA guide
uauguugcgcuuaauucccaaa

SEQ ID NO: 43526 - RNA, 22 nt, Artificial Sequence
  RPE65 RNA guide
uauucuagaagagaacuuggac

SEQ ID NO: 43527 - RNA, 22 nt, Artificial Sequence
  RPE65 RNA guide
uauucugacauucuuaucuuuc

SEQ ID NO: 43528 - RNA, 22 nt, Artificial Sequence
  RPE65 RNA guide
uauugagcacuuauucaugugc

SEQ ID NO: 43529 - RNA, 22 nt, Artificial Sequence
  RPE65 RNA guide
uauugugagaaagauaagaaug

SEQ ID NO: 43530 - RNA, 22 nt, Artificial Sequence
  RPE65 RNA guide
uauugugagaaaguuacuguau

SEQ ID NO: 43531 - RNA, 22 nt, Artificial Sequence
  RPE65 RNA guide
uauuuucaagucgucauccuuu

SEQ ID NO: 43532 - RNA, 22 nt, Artificial Sequence
  RPE65 RNA guide
uauuuucagaagaggacagauu

SEQ ID NO: 43533 - RNA, 22 nt, Artificial Sequence
  RPE65 RNA guide
ucaaacuuagcaaacauuuauu

SEQ ID NO: 43534 - RNA, 22 nt, Artificial Sequence
  RPE65 RNA guide
ucaaaggaugacgacuugaaaa

SEQ ID NO: 43535 - RNA, 22 nt, Artificial Sequence
  RPE65 RNA guide
ucaagucgucauccuuugauau

SEQ ID NO: 43536 - RNA, 22 nt, Artificial Sequence
  RPE65 RNA guide
ucacaauacaguaacuuucuca

SEQ ID NO: 43537 - RNA, 22 nt, Artificial Sequence
  RPE65 RNA guide
ucagaagaggacagauugguaa

SEQ ID NO: 43538 - RNA, 22 nt, Artificial Sequence
  RPE65 RNA guide
ucagaaguacugcccucauccc

SEQ ID NO: 43539 - RNA, 22 nt, Artificial Sequence
  RPE65 RNA guide
ucagaauagcauuuugugcaua

SEQ ID NO: 43540 - RNA, 22 nt, Artificial Sequence
  RPE65 RNA guide
ucagacuucagaaguacugccc

SEQ ID NO: 43541 - RNA, 22 nt, Artificial Sequence
  RPE65 RNA guide
ucauaucaaaggaugacgacuu

SEQ ID NO: 43542 - RNA, 22 nt, Artificial Sequence
  RPE65 RNA guide
ucaucccuacccuauaaggggc

SEQ ID NO: 43543 - RNA, 22 nt, Artificial Sequence
  RPE65 RNA guide
ucauccuuugauaugaugcccu

SEQ ID NO: 43544 - RNA, 22 nt, Artificial Sequence
  RPE65 RNA guide
ucccaaaacuacaaacaaaucu

SEQ ID NO: 43545 - RNA, 22 nt, Artificial Sequence
  RPE65 RNA guide
ucccuacccuauaaggggccua

SEQ ID NO: 43546 - RNA, 22 nt, Artificial Sequence
  RPE65 RNA guide
uccucuucugaaaauaaguguc

SEQ ID NO: 43547 - RNA, 22 nt, Artificial Sequence
  RPE65 RNA guide
uccuuugauaugaugcccuugg

SEQ ID NO: 43548 - RNA, 22 nt, Artificial Sequence
  RPE65 RNA guide
ucgucauccuuugauaugaugc

SEQ ID NO: 43549 - RNA, 22 nt, Artificial Sequence
  RPE65 RNA guide
ucuagaagagaacuuggacacu

SEQ ID NO: 43550 - RNA, 22 nt, Artificial Sequence
  RPE65 RNA guide
ucuaggguacacucuuuuugcu

SEQ ID NO: 43551 - RNA, 22 nt, Artificial Sequence
  RPE65 RNA guide
ucuauaguacuucuaugagaua

SEQ ID NO: 43552 - RNA, 22 nt, Artificial Sequence
  RPE65 RNA guide
ucuauauuuucaagucgucauc

SEQ ID NO: 43553 - RNA, 22 nt, Artificial Sequence
  RPE65 RNA guide
ucucacaauacaguaacuuucu

SEQ ID NO: 43554 - RNA, 22 nt, Artificial Sequence
  RPE65 RNA guide
ucucagacuucagaaguacugc

SEQ ID NO: 43555 - RNA, 22 nt, Artificial Sequence
  RPE65 RNA guide
ucugaagucugagaguaauuua

SEQ ID NO: 43556 - RNA, 22 nt, Artificial Sequence
  RPE65 RNA guide
ucugacauucuuaucuuucuca

SEQ ID NO: 43557 - RNA, 22 nt, Artificial Sequence
  RPE65 RNA guide
ucugagaguaauuuaacuaugc

SEQ ID NO: 43558 - RNA, 22 nt, Artificial Sequence
  RPE65 RNA guide
ucuguccucuucugaaaauaag

SEQ ID NO: 43559 - RNA, 22 nt, Artificial Sequence
  RPE65 RNA guide
ucuuaucuuucucacaauacag

SEQ ID NO: 43560 - RNA, 22 nt, Artificial Sequence
  RPE65 RNA guide
ucuuucucacaauacaguaacu

SEQ ID NO: 43561 - RNA, 22 nt, Artificial Sequence
  RPE65 RNA guide
ugaaaauauagaaagcaagugu

SEQ ID NO: 43562 - RNA, 22 nt, Artificial Sequence
  RPE65 RNA guide
ugaagucugagaguaauuuaac

SEQ ID NO: 43563 - RNA, 22 nt, Artificial Sequence
  RPE65 RNA guide
ugaauaagugcucaauaaaugu

SEQ ID NO: 43564 - RNA, 22 nt, Artificial Sequence
  RPE65 RNA guide
ugacauucuuaucuuucucaca

SEQ ID NO: 43565 - RNA, 22 nt, Artificial Sequence
  RPE65 RNA guide
ugacgacuugaaaauauagaaa

SEQ ID NO: 43566 - RNA, 22 nt, Artificial Sequence
  RPE65 RNA guide
ugagaaagauaagaaugucaga

SEQ ID NO: 43567 - RNA, 22 nt, Artificial Sequence
  RPE65 RNA guide
ugagaaaguuacuguauuguga

SEQ ID NO: 43568 - RNA, 22 nt, Artificial Sequence
  RPE65 RNA guide
ugagaguguacuaaauauguug

SEQ ID NO: 43569 - RNA, 22 nt, Artificial Sequence
  RPE65 RNA guide
ugagcacuuauucaugugcuag

SEQ ID NO: 43570 - RNA, 22 nt, Artificial Sequence
  RPE65 RNA guide
ugagggcaguacuucugaaguc

SEQ ID NO: 43571 - RNA, 22 nt, Artificial Sequence
  RPE65 RNA guide
ugaguuuaccaaucuguccucu

SEQ ID NO: 43572 - RNA, 22 nt, Artificial Sequence
  RPE65 RNA guide
ugauaugaugcccuugggcauu

SEQ ID NO: 43573 - RNA, 22 nt, Artificial Sequence
  RPE65 RNA guide
ugaugcccuugggcauuaggcc

SEQ ID NO: 43574 - RNA, 22 nt, Artificial Sequence
  RPE65 RNA guide
ugcacaaaaugcuauucugaca

SEQ ID NO: 43575 - RNA, 22 nt, Artificial Sequence
  RPE65 RNA guide
ugcauaguuaaauuacucucag

SEQ ID NO: 43576 - RNA, 22 nt, Artificial Sequence
  RPE65 RNA guide
ugcccaagggcaucauaucaaa

SEQ ID NO: 43577 - RNA, 22 nt, Artificial Sequence
  RPE65 RNA guide
ugcccucaucccuacccuauaa

SEQ ID NO: 43578 - RNA, 22 nt, Artificial Sequence
  RPE65 RNA guide
ugcccuugggcauuaggccccu

SEQ ID NO: 43579 - RNA, 22 nt, Artificial Sequence
  RPE65 RNA guide
ugccuagcacaugaauaagugc

SEQ ID NO: 43580 - RNA, 22 nt, Artificial Sequence
  RPE65 RNA guide
ugcgcuuaauucccaaaacuac

SEQ ID NO: 43581 - RNA, 22 nt, Artificial Sequence
  RPE65 RNA guide
ugcuauuaugcacacauacaug

SEQ ID NO: 43582 - RNA, 22 nt, Artificial Sequence
  RPE65 RNA guide
ugcuauucugacauucuuaucu

SEQ ID NO: 43583 - RNA, 22 nt, Artificial Sequence
  RPE65 RNA guide
ugcucaauaaauguuugcuaag

SEQ ID NO: 43584 - RNA, 22 nt, Artificial Sequence
  RPE65 RNA guide
ugcuguaguucuuuuucuauag

SEQ ID NO: 43585 - RNA, 22 nt, Artificial Sequence
  RPE65 RNA guide
ugcuuucuauauuuucaagucg

SEQ ID NO: 43586 - RNA, 22 nt, Artificial Sequence
  RPE65 RNA guide
uggacacuugcuuucuauauuu

SEQ ID NO: 43587 - RNA, 22 nt, Artificial Sequence
  RPE65 RNA guide
ugggaauuaagcgcaacauauu

SEQ ID NO: 43588 - RNA, 22 nt, Artificial Sequence
  RPE65 RNA guide
ugggcauuaggccccuuauagg

SEQ ID NO: 43589 - RNA, 22 nt, Artificial Sequence
  RPE65 RNA guide
uguacuaaauauguugcgcuua

SEQ ID NO: 43590 - RNA, 22 nt, Artificial Sequence
  RPE65 RNA guide
uguaguuuugggaauuaagcgc

SEQ ID NO: 43591 - RNA, 22 nt, Artificial Sequence
  RPE65 RNA guide
uguaugcuauuaugcacacaua

SEQ ID NO: 43592 - RNA, 22 nt, Artificial Sequence
  RPE65 RNA guide
uguauguaugcuauuaugcaca

SEQ ID NO: 43593 - RNA, 22 nt, Artificial Sequence
  RPE65 RNA guide
uguaugugugcauaauagcaua

SEQ ID NO: 43594 - RNA, 22 nt, Artificial Sequence
  RPE65 RNA guide
uguauugugagaaagauaagaa

SEQ ID NO: 43595 - RNA, 22 nt, Artificial Sequence
  RPE65 RNA guide
ugucagaauagcauuuugugca

SEQ ID NO: 43596 - RNA, 22 nt, Artificial Sequence
  RPE65 RNA guide
uguccaaguucucuucuagaau

SEQ ID NO: 43597 - RNA, 22 nt, Artificial Sequence
  RPE65 RNA guide
uguccucuucugaaaauaagug

SEQ ID NO: 43598 - RNA, 22 nt, Artificial Sequence
  RPE65 RNA guide
ugucuauauugugagaaaguua

SEQ ID NO: 43599 - RNA, 22 nt, Artificial Sequence
  RPE65 RNA guide
ugugagaaagauaagaauguca

SEQ ID NO: 43600 - RNA, 22 nt, Artificial Sequence
  RPE65 RNA guide
ugugagaaaguuacuguauugu

SEQ ID NO: 43601 - RNA, 22 nt, Artificial Sequence
  RPE65 RNA guide
ugugcauaguuaaauuacucuc

SEQ ID NO: 43602 - RNA, 22 nt, Artificial Sequence
  RPE65 RNA guide
ugugugcauaauagcauacaua

SEQ ID NO: 43603 - RNA, 22 nt, Artificial Sequence
  RPE65 RNA guide
uguugcgcuuaauucccaaaac

SEQ ID NO: 43604 - RNA, 22 nt, Artificial Sequence
  RPE65 RNA guide
uguuugcuaaguuugaauccua

SEQ ID NO: 43605 - RNA, 22 nt, Artificial Sequence
  RPE65 RNA guide
uguuuguaguuuugggaauuaa

SEQ ID NO: 43606 - RNA, 22 nt, Artificial Sequence
  RPE65 RNA guide
uuaaauuacucucagacuucag

SEQ ID NO: 43607 - RNA, 22 nt, Artificial Sequence
  RPE65 RNA guide
uuaacuaugcacaaaaugcuau

SEQ ID NO: 43608 - RNA, 22 nt, Artificial Sequence
  RPE65 RNA guide
uuaagcgcaacauauuuaguac

SEQ ID NO: 43609 - RNA, 22 nt, Artificial Sequence
  RPE65 RNA guide
uuaauauucuagaagagaacuu

SEQ ID NO: 43610 - RNA, 22 nt, Artificial Sequence
  RPE65 RNA guide
uuaauuuugccuagcacaugaa

SEQ ID NO: 43611 - RNA, 22 nt, Artificial Sequence
  RPE65 RNA guide
uuaccaaucuguccucuucuga

SEQ ID NO: 43612 - RNA, 22 nt, Artificial Sequence
  RPE65 RNA guide
uuacucucagacuucagaagua

SEQ ID NO: 43613 - RNA, 22 nt, Artificial Sequence
  RPE65 RNA guide
uuaggccccuuauaggguaggg

SEQ ID NO: 43614 - RNA, 22 nt, Artificial Sequence
  RPE65 RNA guide
uuauaggguagggaugagggca

SEQ ID NO: 43615 - RNA, 22 nt, Artificial Sequence
  RPE65 RNA guide
uuauugagcacuuauucaugug

SEQ ID NO: 43616 - RNA, 22 nt, Artificial Sequence
  RPE65 RNA guide
uuauuuucagaagaggacagau

SEQ ID NO: 43617 - RNA, 22 nt, Artificial Sequence
  RPE65 RNA guide
uucaagucgucauccuuugaua

SEQ ID NO: 43618 - RNA, 22 nt, Artificial Sequence
  RPE65 RNA guide
uucagaagaggacagauuggua

SEQ ID NO: 43619 - RNA, 22 nt, Artificial Sequence
  RPE65 RNA guide
uucagaaguacugcccucaucc

SEQ ID NO: 43620 - RNA, 22 nt, Artificial Sequence
  RPE65 RNA guide
uucccaaaacuacaaacaaauc

SEQ ID NO: 43621 - RNA, 22 nt, Artificial Sequence
  RPE65 RNA guide
uucuagaagagaacuuggacac

SEQ ID NO: 43622 - RNA, 22 nt, Artificial Sequence
  RPE65 RNA guide
uucuaggguacacucuuuuugc

SEQ ID NO: 43623 - RNA, 22 nt, Artificial Sequence
  RPE65 RNA guide
uucuauauuuucaagucgucau

SEQ ID NO: 43624 - RNA, 22 nt, Artificial Sequence
  RPE65 RNA guide
uucucacaauacaguaacuuuc

SEQ ID NO: 43625 - RNA, 22 nt, Artificial Sequence
  RPE65 RNA guide
uucugaagucugagaguaauuu

SEQ ID NO: 43626 - RNA, 22 nt, Artificial Sequence
  RPE65 RNA guide
uucugacauucuuaucuuucuc

SEQ ID NO: 43627 - RNA, 22 nt, Artificial Sequence
  RPE65 RNA guide
uugaaaauauagaaagcaagug

SEQ ID NO: 43628 - RNA, 22 nt, Artificial Sequence
  RPE65 RNA guide
uugagcacuuauucaugugcua

SEQ ID NO: 43629 - RNA, 22 nt, Artificial Sequence
  RPE65 RNA guide
uugauaugaugcccuugggcau

SEQ ID NO: 43630 - RNA, 22 nt, Artificial Sequence
  RPE65 RNA guide
uugccuagcacaugaauaagug

SEQ ID NO: 43631 - RNA, 22 nt, Artificial Sequence
  RPE65 RNA guide
uugcgcuuaauucccaaaacua

SEQ ID NO: 43632 - RNA, 22 nt, Artificial Sequence
  RPE65 RNA guide
uugcuguaguucuuuuucuaua

SEQ ID NO: 43633 - RNA, 22 nt, Artificial Sequence
  RPE65 RNA guide
uugcuuucuauauuuucaaguc

SEQ ID NO: 43634 - RNA, 22 nt, Artificial Sequence
  RPE65 RNA guide
uuggacacuugcuuucuauauu

SEQ ID NO: 43635 - RNA, 22 nt, Artificial Sequence
  RPE65 RNA guide
uugggaauuaagcgcaacauau

SEQ ID NO: 43636 - RNA, 22 nt, Artificial Sequence
  RPE65 RNA guide
uugggcauuaggccccuuauag

SEQ ID NO: 43637 - RNA, 22 nt, Artificial Sequence
  RPE65 RNA guide
uuguaguuuugggaauuaagcg

SEQ ID NO: 43638 - RNA, 22 nt, Artificial Sequence
  RPE65 RNA guide
uugugagaaagauaagaauguc

SEQ ID NO: 43639 - RNA, 22 nt, Artificial Sequence
  RPE65 RNA guide
uugugagaaaguuacuguauug

SEQ ID NO: 43640 - RNA, 22 nt, Artificial Sequence
  RPE65 RNA guide
uugugcauaguuaaauuacucu

SEQ ID NO: 43641 - RNA, 22 nt, Artificial Sequence
  RPE65 RNA guide
uuguuuguaguuuugggaauua

SEQ ID NO: 43642 - RNA, 22 nt, Artificial Sequence
  RPE65 RNA guide
uuuaccaaucuguccucuucug

SEQ ID NO: 43643 - RNA, 22 nt, Artificial Sequence
  RPE65 RNA guide
uuuauugagcacuuauucaugu

SEQ ID NO: 43644 - RNA, 22 nt, Artificial Sequence
  RPE65 RNA guide
uuucaagucgucauccuuugau

SEQ ID NO: 43645 - RNA, 22 nt, Artificial Sequence
  RPE65 RNA guide
uuucagaagaggacagauuggu

SEQ ID NO: 43646 - RNA, 22 nt, Artificial Sequence
  RPE65 RNA guide
uuucuauauuuucaagucguca

SEQ ID NO: 43647 - RNA, 22 nt, Artificial Sequence
  RPE65 RNA guide
uuucucacaauacaguaacuuu

SEQ ID NO: 43648 - RNA, 22 nt, Artificial Sequence
  RPE65 RNA guide
uuugauaugaugcccuugggca

SEQ ID NO: 43649 - RNA, 22 nt, Artificial Sequence
  RPE65 RNA guide
uuugccuagcacaugaauaagu

SEQ ID NO: 43650 - RNA, 22 nt, Artificial Sequence
  RPE65 RNA guide
uuugggaauuaagcgcaacaua

SEQ ID NO: 43651 - RNA, 22 nt, Artificial Sequence
  RPE65 RNA guide
uuuguaguuuugggaauuaagc

SEQ ID NO: 43652 - RNA, 22 nt, Artificial Sequence
  RPE65 RNA guide
uuugugcauaguuaaauuacuc

SEQ ID NO: 43653 - RNA, 22 nt, Artificial Sequence
  RPE65 RNA guide
uuuguuuguaguuuugggaauu

SEQ ID NO: 43654 - RNA, 22 nt, Artificial Sequence
  RPE65 RNA guide
uuuucaagucgucauccuuuga

SEQ ID NO: 43655 - RNA, 22 nt, Artificial Sequence
  RPE65 RNA guide
uuuucagaagaggacagauugg

SEQ ID NO: 43656 - RNA, 22 nt, Artificial Sequence
  RPE65 RNA guide
uuuugccuagcacaugaauaag

SEQ ID NO: 43657 - RNA, 22 nt, Artificial Sequence
  RPE65 RNA guide
uuuugggaauuaagcgcaacau

SEQ ID NO: 43658 - RNA, 20 nt, Artificial Sequence
  RPE65 RNA guide
aaaacccaccuccagcuauu

SEQ ID NO: 43659 - RNA, 20 nt, Artificial Sequence
  RPE65 RNA guide
aaaaggcauuuugaccauuc

SEQ ID NO: 43660 - RNA, 20 nt, Artificial Sequence
  RPE65 RNA guide
aaaaucacccaggaaaaucc

SEQ ID NO: 43661 - RNA, 20 nt, Artificial Sequence
  RPE65 RNA guide
aaaauccaaauagcagcaga

SEQ ID NO: 43662 - RNA, 20 nt, Artificial Sequence
  RPE65 RNA guide
aaacccaccuccagcuauug

SEQ ID NO: 43663 - RNA, 20 nt, Artificial Sequence
  RPE65 RNA guide
aaaccucagaauggucaaaa

SEQ ID NO: 43664 - RNA, 20 nt, Artificial Sequence
  RPE65 RNA guide
aaacgugcacucaaauaggg

SEQ ID NO: 43665 - RNA, 20 nt, Artificial Sequence
  RPE65 RNA guide
aaacuauauccuuugggcau

SEQ ID NO: 43666 - RNA, 20 nt, Artificial Sequence
  RPE65 RNA guide
aaacucuuuaugugauucug

SEQ ID NO: 43667 - RNA, 20 nt, Artificial Sequence
  RPE65 RNA guide
aaaggcauuuugaccauucu

SEQ ID NO: 43668 - RNA, 20 nt, Artificial Sequence
  RPE65 RNA guide
aaagugguuuuaaaaggcuu

SEQ ID NO: 43669 - RNA, 20 nt, Artificial Sequence
  RPE65 RNA guide
aaaguuugaggaccauucac

SEQ ID NO: 43670 - RNA, 20 nt, Artificial Sequence
  RPE65 RNA guide
aaauagcagcagauuuggaa

SEQ ID NO: 43671 - RNA, 20 nt, Artificial Sequence
  RPE65 RNA guide
aaauaggguuguggcaagug

SEQ ID NO: 43672 - RNA, 20 nt, Artificial Sequence
  RPE65 RNA guide
aaaucacccaggaaaaucca

SEQ ID NO: 43673 - RNA, 20 nt, Artificial Sequence
  RPE65 RNA guide
aaauccaaauagcagcagau

SEQ ID NO: 43674 - RNA, 20 nt, Artificial Sequence
  RPE65 RNA guide
aaaucugcugcuauuuggau

SEQ ID NO: 43675 - RNA, 20 nt, Artificial Sequence
  RPE65 RNA guide
aaaugccuuuugcaacaucu

SEQ ID NO: 43676 - RNA, 20 nt, Artificial Sequence
  RPE65 RNA guide
aacagcuuauacaggcaaag

SEQ ID NO: 43677 - RNA, 20 nt, Artificial Sequence
  RPE65 RNA guide
aacaucuuaagaugcccaaa

SEQ ID NO: 43678 - RNA, 20 nt, Artificial Sequence
  RPE65 RNA guide
aacccaccuccagcuauugc

SEQ ID NO: 43679 - RNA, 20 nt, Artificial Sequence
  RPE65 RNA guide
aacccaucuaaacuauaucc

SEQ ID NO: 43680 - RNA, 20 nt, Artificial Sequence
  RPE65 RNA guide
aaccccucuaaaacaaucaa

SEQ ID NO: 43681 - RNA, 20 nt, Artificial Sequence
  RPE65 RNA guide
aacccuauuugagugcacgu

SEQ ID NO: 43682 - RNA, 20 nt, Artificial Sequence
  RPE65 RNA guide
aaccucagaauggucaaaau

SEQ ID NO: 43683 - RNA, 20 nt, Artificial Sequence
  RPE65 RNA guide
aacgugcacucaaauagggu

SEQ ID NO: 43684 - RNA, 20 nt, Artificial Sequence
  RPE65 RNA guide
aacuauauccuuugggcauc

SEQ ID NO: 43685 - RNA, 20 nt, Artificial Sequence
  RPE65 RNA guide
aacucuuuaugugauucuga

SEQ ID NO: 43686 - RNA, 20 nt, Artificial Sequence
  RPE65 RNA guide
aagaaaccucagaaugguca

SEQ ID NO: 43687 - RNA, 20 nt, Artificial Sequence
  RPE65 RNA guide
aagaagugcaaaugauggag

SEQ ID NO: 43688 - RNA, 20 nt, Artificial Sequence
  RPE65 RNA guide
aagaauuacuguacagggcu

SEQ ID NO: 43689 - RNA, 20 nt, Artificial Sequence
  RPE65 RNA guide
aagaugcccaaaggauauag

SEQ ID NO: 43690 - RNA, 20 nt, Artificial Sequence
  RPE65 RNA guide
aagaugugacuccacuacac

SEQ ID NO: 43691 - RNA, 20 nt, Artificial Sequence
  RPE65 RNA guide
aagauguugcaaaaggcauu

SEQ ID NO: 43692 - RNA, 20 nt, Artificial Sequence
  RPE65 RNA guide
aagcauuuagaacagcuuau

SEQ ID NO: 43693 - RNA, 20 nt, Artificial Sequence
  RPE65 RNA guide
aagcugcaaaaucacccagg

SEQ ID NO: 43694 - RNA, 20 nt, Artificial Sequence
  RPE65 RNA guide
aaggauauaguuuagauggg

SEQ ID NO: 43695 - RNA, 20 nt, Artificial Sequence
  RPE65 RNA guide
aaggcauuuugaccauucug

SEQ ID NO: 43696 - RNA, 20 nt, Artificial Sequence
  RPE65 RNA guide
aagucaggggaguagggaag

SEQ ID NO: 43697 - RNA, 20 nt, Artificial Sequence
  RPE65 RNA guide
aagugaaugguccucaaacu

SEQ ID NO: 43698 - RNA, 20 nt, Artificial Sequence
  RPE65 RNA guide
aagugcaaaugauggagaaa

SEQ ID NO: 43699 - RNA, 20 nt, Artificial Sequence
  RPE65 RNA guide
aaguggaguguaguggaguc

SEQ ID NO: 43700 - RNA, 20 nt, Artificial Sequence
  RPE65 RNA guide
aagugguuuuaaaaggcuuu

SEQ ID NO: 43701 - RNA, 20 nt, Artificial Sequence
  RPE65 RNA guide
aaguuugaggaccauucacu

SEQ ID NO: 43702 - RNA, 20 nt, Artificial Sequence
  RPE65 RNA guide
aauagcagcagauuuggaaa

SEQ ID NO: 43703 - RNA, 20 nt, Artificial Sequence
  RPE65 RNA guide
aauagcccuguacaguaauu

SEQ ID NO: 43704 - RNA, 20 nt, Artificial Sequence
  RPE65 RNA guide
aauagcuggagguggguuuu

SEQ ID NO: 43705 - RNA, 20 nt, Artificial Sequence
  RPE65 RNA guide
aauaggguuguggcaagugg

SEQ ID NO: 43706 - RNA, 20 nt, Artificial Sequence
  RPE65 RNA guide
aaucaaaauguguuucuuug

SEQ ID NO: 43707 - RNA, 20 nt, Artificial Sequence
  RPE65 RNA guide
aaucacccaggaaaauccaa

SEQ ID NO: 43708 - RNA, 20 nt, Artificial Sequence
  RPE65 RNA guide
aauccaaauagcagcagauu

SEQ ID NO: 43709 - RNA, 20 nt, Artificial Sequence
  RPE65 RNA guide
aaucugcugcuauuuggauu

SEQ ID NO: 43710 - RNA, 20 nt, Artificial Sequence
  RPE65 RNA guide
aaugccuuuugcaacaucuu

SEQ ID NO: 43711 - RNA, 20 nt, Artificial Sequence
  RPE65 RNA guide
aauggucaaaaugccuuuug

SEQ ID NO: 43712 - RNA, 20 nt, Artificial Sequence
  RPE65 RNA guide
aaugguccucaaacuuuagu

SEQ ID NO: 43713 - RNA, 20 nt, Artificial Sequence
  RPE65 RNA guide
aauguguuucuuugccugua

SEQ ID NO: 43714 - RNA, 20 nt, Artificial Sequence
  RPE65 RNA guide
aauuacuguacagggcuauu

SEQ ID NO: 43715 - RNA, 20 nt, Artificial Sequence
  RPE65 RNA guide
aauuucaugugaagcugcaa

SEQ ID NO: 43716 - RNA, 20 nt, Artificial Sequence
  RPE65 RNA guide
acaaacccaucuaaacuaua

SEQ ID NO: 43717 - RNA, 20 nt, Artificial Sequence
  RPE65 RNA guide
acaacccuauuugagugcac

SEQ ID NO: 43718 - RNA, 20 nt, Artificial Sequence
  RPE65 RNA guide
acaaucaaaauguguuucuu

SEQ ID NO: 43719 - RNA, 20 nt, Artificial Sequence
  RPE65 RNA guide
acacaaacccaucuaaacua

SEQ ID NO: 43720 - RNA, 20 nt, Artificial Sequence
  RPE65 RNA guide
acacauuuugauuguuuuag

SEQ ID NO: 43721 - RNA, 20 nt, Artificial Sequence
  RPE65 RNA guide
acacuaaaguuugaggacca

SEQ ID NO: 43722 - RNA, 20 nt, Artificial Sequence
  RPE65 RNA guide
acacuccacuugccacaacc

SEQ ID NO: 43723 - RNA, 20 nt, Artificial Sequence
  RPE65 RNA guide
acagcuuauacaggcaaaga

SEQ ID NO: 43724 - RNA, 20 nt, Artificial Sequence
  RPE65 RNA guide
acaggcaaagaaacacauuu

SEQ ID NO: 43725 - RNA, 20 nt, Artificial Sequence
  RPE65 RNA guide
acagggcuauugacacaaac

SEQ ID NO: 43726 - RNA, 20 nt, Artificial Sequence
  RPE65 RNA guide
acaucuuaagaugcccaaag

SEQ ID NO: 43727 - RNA, 20 nt, Artificial Sequence
  RPE65 RNA guide
acaucuugcaauagcuggag

SEQ ID NO: 43728 - RNA, 20 nt, Artificial Sequence
  RPE65 RNA guide
acaugaaauuucacuaagaa

SEQ ID NO: 43729 - RNA, 20 nt, Artificial Sequence
  RPE65 RNA guide
acauuuugauuguuuuagag

SEQ ID NO: 43730 - RNA, 20 nt, Artificial Sequence
  RPE65 RNA guide
accauucacuuacuagugag

SEQ ID NO: 43731 - RNA, 20 nt, Artificial Sequence
  RPE65 RNA guide
accauucugagguuucuucc

SEQ ID NO: 43732 - RNA, 20 nt, Artificial Sequence
  RPE65 RNA guide
acccaccuccagcuauugca

SEQ ID NO: 43733 - RNA, 20 nt, Artificial Sequence
  RPE65 RNA guide
acccaggaaaauccaaauag

SEQ ID NO: 43734 - RNA, 20 nt, Artificial Sequence
  RPE65 RNA guide
acccaucuaaacuauauccu

SEQ ID NO: 43735 - RNA, 20 nt, Artificial Sequence
  RPE65 RNA guide
accccucuaaaacaaucaaa

SEQ ID NO: 43736 - RNA, 20 nt, Artificial Sequence
  RPE65 RNA guide
acccuauuugagugcacguu

SEQ ID NO: 43737 - RNA, 20 nt, Artificial Sequence
  RPE65 RNA guide
accucagaauggucaaaaug

SEQ ID NO: 43738 - RNA, 20 nt, Artificial Sequence
  RPE65 RNA guide
accuccagcuauugcaagau

SEQ ID NO: 43739 - RNA, 20 nt, Artificial Sequence
  RPE65 RNA guide
acgugcacucaaauaggguu

SEQ ID NO: 43740 - RNA, 20 nt, Artificial Sequence
  RPE65 RNA guide
acguuuccaaaucugcugcu

SEQ ID NO: 43741 - RNA, 20 nt, Artificial Sequence
  RPE65 RNA guide
acuaaaguuugaggaccauu

SEQ ID NO: 43742 - RNA, 20 nt, Artificial Sequence
  RPE65 RNA guide
acuaagaagugcaaaugaug

SEQ ID NO: 43743 - RNA, 20 nt, Artificial Sequence
  RPE65 RNA guide
acuacacuccacuugccaca

SEQ ID NO: 43744 - RNA, 20 nt, Artificial Sequence
  RPE65 RNA guide
acuaguaagugaaugguccu

SEQ ID NO: 43745 - RNA, 20 nt, Artificial Sequence
  RPE65 RNA guide
acuauauccuuugggcaucu

SEQ ID NO: 43746 - RNA, 20 nt, Artificial Sequence
  RPE65 RNA guide
acucaaauaggguuguggca

SEQ ID NO: 43747 - RNA, 20 nt, Artificial Sequence
  RPE65 RNA guide
acucacuaguaagugaaugg

SEQ ID NO: 43748 - RNA, 20 nt, Artificial Sequence
  RPE65 RNA guide
acuccacuacacuccacuug

SEQ ID NO: 43749 - RNA, 20 nt, Artificial Sequence
  RPE65 RNA guide
acuccacuugccacaacccu

SEQ ID NO: 43750 - RNA, 20 nt, Artificial Sequence
  RPE65 RNA guide
acuccccugacuuaaaaccc

SEQ ID NO: 43751 - RNA, 20 nt, Artificial Sequence
  RPE65 RNA guide
acucuuuaugugauucugau

SEQ ID NO: 43752 - RNA, 20 nt, Artificial Sequence
  RPE65 RNA guide
acuguacagggcuauugaca

SEQ ID NO: 43753 - RNA, 20 nt, Artificial Sequence
  RPE65 RNA guide
acuuaaaacccaccuccagc

SEQ ID NO: 43754 - RNA, 20 nt, Artificial Sequence
  RPE65 RNA guide
acuugccacaacccuauuug

SEQ ID NO: 43755 - RNA, 20 nt, Artificial Sequence
  RPE65 RNA guide
acuuuagugugcaucagaau

SEQ ID NO: 43756 - RNA, 20 nt, Artificial Sequence
  RPE65 RNA guide
agaaaccucagaauggucaa

SEQ ID NO: 43757 - RNA, 20 nt, Artificial Sequence
  RPE65 RNA guide
agaacagcuuauacaggcaa

SEQ ID NO: 43758 - RNA, 20 nt, Artificial Sequence
  RPE65 RNA guide
agaagugcaaaugauggaga

SEQ ID NO: 43759 - RNA, 20 nt, Artificial Sequence
  RPE65 RNA guide
agaauggucaaaaugccuuu

SEQ ID NO: 43760 - RNA, 20 nt, Artificial Sequence
  RPE65 RNA guide
agaauuacuguacagggcua

SEQ ID NO: 43761 - RNA, 20 nt, Artificial Sequence
  RPE65 RNA guide
agagggguuauuuucauuuu

SEQ ID NO: 43762 - RNA, 20 nt, Artificial Sequence
  RPE65 RNA guide
agaugcccaaaggauauagu

SEQ ID NO: 43763 - RNA, 20 nt, Artificial Sequence
  RPE65 RNA guide
agauggguuugugucaauag

SEQ ID NO: 43764 - RNA, 20 nt, Artificial Sequence
  RPE65 RNA guide
agaugugacuccacuacacu

SEQ ID NO: 43765 - RNA, 20 nt, Artificial Sequence
  RPE65 RNA guide
agauguugcaaaaggcauuu

SEQ ID NO: 43766 - RNA, 20 nt, Artificial Sequence
  RPE65 RNA guide
agauuuggaaacgugcacuc

SEQ ID NO: 43767 - RNA, 20 nt, Artificial Sequence
  RPE65 RNA guide
agcagauuuggaaacgugca

SEQ ID NO: 43768 - RNA, 20 nt, Artificial Sequence
  RPE65 RNA guide
agcagcagauuuggaaacgu

SEQ ID NO: 43769 - RNA, 20 nt, Artificial Sequence
  RPE65 RNA guide
agcauuuagaacagcuuaua

SEQ ID NO: 43770 - RNA, 20 nt, Artificial Sequence
  RPE65 RNA guide
agcccuguacaguaauucuu

SEQ ID NO: 43771 - RNA, 20 nt, Artificial Sequence
  RPE65 RNA guide
agcuauugcaagaugugacu

SEQ ID NO: 43772 - RNA, 20 nt, Artificial Sequence
  RPE65 RNA guide
agcugcaaaaucacccagga

SEQ ID NO: 43773 - RNA, 20 nt, Artificial Sequence
  RPE65 RNA guide
agcuggagguggguuuuaag

SEQ ID NO: 43774 - RNA, 20 nt, Artificial Sequence
  RPE65 RNA guide
agcuuauacaggcaaagaaa

SEQ ID NO: 43775 - RNA, 20 nt, Artificial Sequence
  RPE65 RNA guide
agcuucacaugaaauuucac

SEQ ID NO: 43776 - RNA, 20 nt, Artificial Sequence
  RPE65 RNA guide
aggaaaauccaaauagcagc

SEQ ID NO: 43777 - RNA, 20 nt, Artificial Sequence
  RPE65 RNA guide
aggaccauucacuuacuagu

SEQ ID NO: 43778 - RNA, 20 nt, Artificial Sequence
  RPE65 RNA guide
aggauauaguuuagaugggu

SEQ ID NO: 43779 - RNA, 20 nt, Artificial Sequence
  RPE65 RNA guide
aggcaaagaaacacauuuug

SEQ ID NO: 43780 - RNA, 20 nt, Artificial Sequence
  RPE65 RNA guide
aggcauuuugaccauucuga

SEQ ID NO: 43781 - RNA, 20 nt, Artificial Sequence
  RPE65 RNA guide
agggaagaaaccucagaaug

SEQ ID NO: 43782 - RNA, 20 nt, Artificial Sequence
  RPE65 RNA guide
agggcuauugacacaaaccc

SEQ ID NO: 43783 - RNA, 20 nt, Artificial Sequence
  RPE65 RNA guide
aggggaguagggaagaaacc

SEQ ID NO: 43784 - RNA, 20 nt, Artificial Sequence
  RPE65 RNA guide
agggguuauuuucauuuucu

SEQ ID NO: 43785 - RNA, 20 nt, Artificial Sequence
  RPE65 RNA guide
aggguuguggcaaguggagu

SEQ ID NO: 43786 - RNA, 20 nt, Artificial Sequence
  RPE65 RNA guide
agguggguuuuaagucaggg

SEQ ID NO: 43787 - RNA, 20 nt, Artificial Sequence
  RPE65 RNA guide
agguuucuucccuacucccc

SEQ ID NO: 43788 - RNA, 20 nt, Artificial Sequence
  RPE65 RNA guide
aguaagugaaugguccucaa

SEQ ID NO: 43789 - RNA, 20 nt, Artificial Sequence
  RPE65 RNA guide
aguagggaagaaaccucaga

SEQ ID NO: 43790 - RNA, 20 nt, Artificial Sequence
  RPE65 RNA guide
agucacaucuugcaauagcu

SEQ ID NO: 43791 - RNA, 20 nt, Artificial Sequence
  RPE65 RNA guide
agucaggggaguagggaaga

SEQ ID NO: 43792 - RNA, 20 nt, Artificial Sequence
  RPE65 RNA guide
agugaaauuucaugugaagc

SEQ ID NO: 43793 - RNA, 20 nt, Artificial Sequence
  RPE65 RNA guide
agugaaugguccucaaacuu

SEQ ID NO: 43794 - RNA, 20 nt, Artificial Sequence
  RPE65 RNA guide
agugcaaaugauggagaaaa

SEQ ID NO: 43795 - RNA, 20 nt, Artificial Sequence
  RPE65 RNA guide
agugcacguuuccaaaucug

SEQ ID NO: 43796 - RNA, 20 nt, Artificial Sequence
  RPE65 RNA guide
aguggagucacaucuugcaa

SEQ ID NO: 43797 - RNA, 20 nt, Artificial Sequence
  RPE65 RNA guide
aguggaguguaguggaguca

SEQ ID NO: 43798 - RNA, 20 nt, Artificial Sequence
  RPE65 RNA guide
aguguaguggagucacaucu

SEQ ID NO: 43799 - RNA, 20 nt, Artificial Sequence
  RPE65 RNA guide
agugugcaucagaaucacau

SEQ ID NO: 43800 - RNA, 20 nt, Artificial Sequence
  RPE65 RNA guide
aguuuagauggguuuguguc

SEQ ID NO: 43801 - RNA, 20 nt, Artificial Sequence
  RPE65 RNA guide
aguuugaggaccauucacuu

SEQ ID NO: 43802 - RNA, 20 nt, Artificial Sequence
  RPE65 RNA guide
auaagaauuacuguacaggg

SEQ ID NO: 43803 - RNA, 20 nt, Artificial Sequence
  RPE65 RNA guide
auacaggcaaagaaacacau

SEQ ID NO: 43804 - RNA, 20 nt, Artificial Sequence
  RPE65 RNA guide
auagcagcagauuuggaaac

SEQ ID NO: 43805 - RNA, 20 nt, Artificial Sequence
  RPE65 RNA guide
auagcccuguacaguaauuc

SEQ ID NO: 43806 - RNA, 20 nt, Artificial Sequence
  RPE65 RNA guide
auagcuggagguggguuuua

SEQ ID NO: 43807 - RNA, 20 nt, Artificial Sequence
  RPE65 RNA guide
auaggguuguggcaagugga

SEQ ID NO: 43808 - RNA, 20 nt, Artificial Sequence
  RPE65 RNA guide
auaguuuagauggguuugug

SEQ ID NO: 43809 - RNA, 20 nt, Artificial Sequence
  RPE65 RNA guide
auauaguuuagauggguuug

SEQ ID NO: 43810 - RNA, 20 nt, Artificial Sequence
  RPE65 RNA guide
auauccuuugggcaucuuaa

SEQ ID NO: 43811 - RNA, 20 nt, Artificial Sequence
  RPE65 RNA guide
aucaaaauguguuucuuugc

SEQ ID NO: 43812 - RNA, 20 nt, Artificial Sequence
  RPE65 RNA guide
aucacccaggaaaauccaaa

SEQ ID NO: 43813 - RNA, 20 nt, Artificial Sequence
  RPE65 RNA guide
auccaaauagcagcagauuu

SEQ ID NO: 43814 - RNA, 20 nt, Artificial Sequence
  RPE65 RNA guide
auccuuugggcaucuuaaga

SEQ ID NO: 43815 - RNA, 20 nt, Artificial Sequence
  RPE65 RNA guide
aucuaaacuauauccuuugg

SEQ ID NO: 43816 - RNA, 20 nt, Artificial Sequence
  RPE65 RNA guide
aucugcugcuauuuggauuu

SEQ ID NO: 43817 - RNA, 20 nt, Artificial Sequence
  RPE65 RNA guide
aucuuaagaugcccaaagga

SEQ ID NO: 43818 - RNA, 20 nt, Artificial Sequence
  RPE65 RNA guide
aucuuaagauguugcaaaag

SEQ ID NO: 43819 - RNA, 20 nt, Artificial Sequence
  RPE65 RNA guide
aucuugcaauagcuggaggu

SEQ ID NO: 43820 - RNA, 20 nt, Artificial Sequence
  RPE65 RNA guide
augcacacuaaaguuugagg

SEQ ID NO: 43821 - RNA, 20 nt, Artificial Sequence
  RPE65 RNA guide
augcccaaaggauauaguuu

SEQ ID NO: 43822 - RNA, 20 nt, Artificial Sequence
  RPE65 RNA guide
augccuuuugcaacaucuua

SEQ ID NO: 43823 - RNA, 20 nt, Artificial Sequence
  RPE65 RNA guide
auggagaaaaugaaaauaac

SEQ ID NO: 43824 - RNA, 20 nt, Artificial Sequence
  RPE65 RNA guide
auggguuugugucaauagcc

SEQ ID NO: 43825 - RNA, 20 nt, Artificial Sequence
  RPE65 RNA guide
auggucaaaaugccuuuugc

SEQ ID NO: 43826 - RNA, 20 nt, Artificial Sequence
  RPE65 RNA guide
augguccucaaacuuuagug

SEQ ID NO: 43827 - RNA, 20 nt, Artificial Sequence
  RPE65 RNA guide
augugaagcugcaaaaucac

SEQ ID NO: 43828 - RNA, 20 nt, Artificial Sequence
  RPE65 RNA guide
augugacuccacuacacucc

SEQ ID NO: 43829 - RNA, 20 nt, Artificial Sequence
  RPE65 RNA guide
augugauucugaugcacacu

SEQ ID NO: 43830 - RNA, 20 nt, Artificial Sequence
  RPE65 RNA guide
augugcauaagaauuacugu

SEQ ID NO: 43831 - RNA, 20 nt, Artificial Sequence
  RPE65 RNA guide
auguguuucuuugccuguau

SEQ ID NO: 43832 - RNA, 20 nt, Artificial Sequence
  RPE65 RNA guide
auguugcaaaaggcauuuug

SEQ ID NO: 43833 - RNA, 20 nt, Artificial Sequence
  RPE65 RNA guide
auuacuguacagggcuauug

SEQ ID NO: 43834 - RNA, 20 nt, Artificial Sequence
  RPE65 RNA guide
auucugagguuucuucccua

SEQ ID NO: 43835 - RNA, 20 nt, Artificial Sequence
  RPE65 RNA guide
auugacacaaacccaucuaa

SEQ ID NO: 43836 - RNA, 20 nt, Artificial Sequence
  RPE65 RNA guide
auugcaagaugugacuccac

SEQ ID NO: 43837 - RNA, 20 nt, Artificial Sequence
  RPE65 RNA guide
auuuacucacuaguaaguga

SEQ ID NO: 43838 - RNA, 20 nt, Artificial Sequence
  RPE65 RNA guide
auuuagaacagcuuauacag

SEQ ID NO: 43839 - RNA, 20 nt, Artificial Sequence
  RPE65 RNA guide
auuucaugugaagcugcaaa

SEQ ID NO: 43840 - RNA, 20 nt, Artificial Sequence
  RPE65 RNA guide
auuugagugcacguuuccaa

SEQ ID NO: 43841 - RNA, 20 nt, Artificial Sequence
  RPE65 RNA guide
auuuggaaacgugcacucaa

SEQ ID NO: 43842 - RNA, 20 nt, Artificial Sequence
  RPE65 RNA guide
auuuggauuuuccuggguga

SEQ ID NO: 43843 - RNA, 20 nt, Artificial Sequence
  RPE65 RNA guide
auuuuccugggugauuuugc

SEQ ID NO: 43844 - RNA, 20 nt, Artificial Sequence
  RPE65 RNA guide
auuuucuccaucauuugcac

SEQ ID NO: 43845 - RNA, 20 nt, Artificial Sequence
  RPE65 RNA guide
auuuugaccauucugagguu

SEQ ID NO: 43846 - RNA, 20 nt, Artificial Sequence
  RPE65 RNA guide
caaaaggcauuuugaccauu

SEQ ID NO: 43847 - RNA, 20 nt, Artificial Sequence
  RPE65 RNA guide
caaaaucacccaggaaaauc

SEQ ID NO: 43848 - RNA, 20 nt, Artificial Sequence
  RPE65 RNA guide
caaaaugccuuuugcaacau

SEQ ID NO: 43849 - RNA, 20 nt, Artificial Sequence
  RPE65 RNA guide
caaaauguguuucuuugccu

SEQ ID NO: 43850 - RNA, 20 nt, Artificial Sequence
  RPE65 RNA guide
caaacccaucuaaacuauau

SEQ ID NO: 43851 - RNA, 20 nt, Artificial Sequence
  RPE65 RNA guide
caaagcauuuagaacagcuu

SEQ ID NO: 43852 - RNA, 20 nt, Artificial Sequence
  RPE65 RNA guide
caaaggauauaguuuagaug

SEQ ID NO: 43853 - RNA, 20 nt, Artificial Sequence
  RPE65 RNA guide
caaauagcagcagauuugga

SEQ ID NO: 43854 - RNA, 20 nt, Artificial Sequence
  RPE65 RNA guide
caaauaggguuguggcaagu

SEQ ID NO: 43855 - RNA, 20 nt, Artificial Sequence
  RPE65 RNA guide
caaaucugcugcuauuugga

SEQ ID NO: 43856 - RNA, 20 nt, Artificial Sequence
  RPE65 RNA guide
caacaucuuaagaugcccaa

SEQ ID NO: 43857 - RNA, 20 nt, Artificial Sequence
  RPE65 RNA guide
caacccuauuugagugcacg

SEQ ID NO: 43858 - RNA, 20 nt, Artificial Sequence
  RPE65 RNA guide
caagaugugacuccacuaca

SEQ ID NO: 43859 - RNA, 20 nt, Artificial Sequence
  RPE65 RNA guide
caaguggaguguaguggagu

SEQ ID NO: 43860 - RNA, 20 nt, Artificial Sequence
  RPE65 RNA guide
caauagcccuguacaguaau

SEQ ID NO: 43861 - RNA, 20 nt, Artificial Sequence
  RPE65 RNA guide
caauagcuggagguggguuu

SEQ ID NO: 43862 - RNA, 20 nt, Artificial Sequence
  RPE65 RNA guide
caaucaaaauguguuucuuu

SEQ ID NO: 43863 - RNA, 20 nt, Artificial Sequence
  RPE65 RNA guide
cacaaacccaucuaaacuau

SEQ ID NO: 43864 - RNA, 20 nt, Artificial Sequence
  RPE65 RNA guide
cacaacccuauuugagugca

SEQ ID NO: 43865 - RNA, 20 nt, Artificial Sequence
  RPE65 RNA guide
cacacuaaaguuugaggacc

SEQ ID NO: 43866 - RNA, 20 nt, Artificial Sequence
  RPE65 RNA guide
cacaucuugcaauagcugga

SEQ ID NO: 43867 - RNA, 20 nt, Artificial Sequence
  RPE65 RNA guide
cacaugaaauuucacuaaga

SEQ ID NO: 43868 - RNA, 20 nt, Artificial Sequence
  RPE65 RNA guide
cacauuuugauuguuuuaga

SEQ ID NO: 43869 - RNA, 20 nt, Artificial Sequence
  RPE65 RNA guide
cacccaggaaaauccaaaua

SEQ ID NO: 43870 - RNA, 20 nt, Artificial Sequence
  RPE65 RNA guide
caccuccagcuauugcaaga

SEQ ID NO: 43871 - RNA, 20 nt, Artificial Sequence
  RPE65 RNA guide
cacguuuccaaaucugcugc

SEQ ID NO: 43872 - RNA, 20 nt, Artificial Sequence
  RPE65 RNA guide
cacuaaaguuugaggaccau

SEQ ID NO: 43873 - RNA, 20 nt, Artificial Sequence
  RPE65 RNA guide
cacuaagaagugcaaaugau

SEQ ID NO: 43874 - RNA, 20 nt, Artificial Sequence
  RPE65 RNA guide
cacuacacuccacuugccac

SEQ ID NO: 43875 - RNA, 20 nt, Artificial Sequence
  RPE65 RNA guide
cacuaguaagugaauggucc

SEQ ID NO: 43876 - RNA, 20 nt, Artificial Sequence
  RPE65 RNA guide
cacucaaauaggguuguggc

SEQ ID NO: 43877 - RNA, 20 nt, Artificial Sequence
  RPE65 RNA guide
cacuccacuugccacaaccc

SEQ ID NO: 43878 - RNA, 20 nt, Artificial Sequence
  RPE65 RNA guide
cacuucuuagugaaauuuca

SEQ ID NO: 43879 - RNA, 20 nt, Artificial Sequence
  RPE65 RNA guide
cacuugccacaacccuauuu

SEQ ID NO: 43880 - RNA, 20 nt, Artificial Sequence
  RPE65 RNA guide
cagaauggucaaaaugccuu

SEQ ID NO: 43881 - RNA, 20 nt, Artificial Sequence
  RPE65 RNA guide
cagauuuggaaacgugcacu

SEQ ID NO: 43882 - RNA, 20 nt, Artificial Sequence
  RPE65 RNA guide
cagcagauuuggaaacgugc

SEQ ID NO: 43883 - RNA, 20 nt, Artificial Sequence
  RPE65 RNA guide
cagcuauugcaagaugugac

SEQ ID NO: 43884 - RNA, 20 nt, Artificial Sequence
  RPE65 RNA guide
cagcuuauacaggcaaagaa

SEQ ID NO: 43885 - RNA, 20 nt, Artificial Sequence
  RPE65 RNA guide
cagcuucacaugaaauuuca

SEQ ID NO: 43886 - RNA, 20 nt, Artificial Sequence
  RPE65 RNA guide
caggaaaauccaaauagcag

SEQ ID NO: 43887 - RNA, 20 nt, Artificial Sequence
  RPE65 RNA guide
caggcaaagaaacacauuuu

SEQ ID NO: 43888 - RNA, 20 nt, Artificial Sequence
  RPE65 RNA guide
cagggcuauugacacaaacc

SEQ ID NO: 43889 - RNA, 20 nt, Artificial Sequence
  RPE65 RNA guide
caggggaguagggaagaaac

SEQ ID NO: 43890 - RNA, 20 nt, Artificial Sequence
  RPE65 RNA guide
cauaagaauuacuguacagg

SEQ ID NO: 43891 - RNA, 20 nt, Artificial Sequence
  RPE65 RNA guide
caucagaaucacauaaagag

SEQ ID NO: 43892 - RNA, 20 nt, Artificial Sequence
  RPE65 RNA guide
caucauuugcacuucuuagu

SEQ ID NO: 43893 - RNA, 20 nt, Artificial Sequence
  RPE65 RNA guide
caucuaaacuauauccuuug

SEQ ID NO: 43894 - RNA, 20 nt, Artificial Sequence
  RPE65 RNA guide
caucuuaagaugcccaaagg

SEQ ID NO: 43895 - RNA, 20 nt, Artificial Sequence
  RPE65 RNA guide
caucuuaagauguugcaaaa

SEQ ID NO: 43896 - RNA, 20 nt, Artificial Sequence
  RPE65 RNA guide
caucuugcaauagcuggagg

SEQ ID NO: 43897 - RNA, 20 nt, Artificial Sequence
  RPE65 RNA guide
caugaaauuucacuaagaag

SEQ ID NO: 43898 - RNA, 20 nt, Artificial Sequence
  RPE65 RNA guide
caugugaagcugcaaaauca

SEQ ID NO: 43899 - RNA, 20 nt, Artificial Sequence
  RPE65 RNA guide
cauucugagguuucuucccu

SEQ ID NO: 43900 - RNA, 20 nt, Artificial Sequence
  RPE65 RNA guide
cauuuagaacagcuuauaca

SEQ ID NO: 43901 - RNA, 20 nt, Artificial Sequence
  RPE65 RNA guide
cauuuucuccaucauuugca

SEQ ID NO: 43902 - RNA, 20 nt, Artificial Sequence
  RPE65 RNA guide
cauuuugaccauucugaggu

SEQ ID NO: 43903 - RNA, 20 nt, Artificial Sequence
  RPE65 RNA guide
cauuuugauuguuuuagagg

SEQ ID NO: 43904 - RNA, 20 nt, Artificial Sequence
  RPE65 RNA guide
ccaaagccuuuuaaaaccac

SEQ ID NO: 43905 - RNA, 20 nt, Artificial Sequence
  RPE65 RNA guide
ccaaaggauauaguuuagau

SEQ ID NO: 43906 - RNA, 20 nt, Artificial Sequence
  RPE65 RNA guide
ccaaauagcagcagauuugg

SEQ ID NO: 43907 - RNA, 20 nt, Artificial Sequence
  RPE65 RNA guide
ccaaaucugcugcuauuugg

SEQ ID NO: 43908 - RNA, 20 nt, Artificial Sequence
  RPE65 RNA guide
ccacaacccuauuugagugc

SEQ ID NO: 43909 - RNA, 20 nt, Artificial Sequence
  RPE65 RNA guide
ccaccuccagcuauugcaag

SEQ ID NO: 43910 - RNA, 20 nt, Artificial Sequence
  RPE65 RNA guide
ccacuacacuccacuugcca

SEQ ID NO: 43911 - RNA, 20 nt, Artificial Sequence
  RPE65 RNA guide
ccacuugccacaacccuauu

SEQ ID NO: 43912 - RNA, 20 nt, Artificial Sequence
  RPE65 RNA guide
ccagcuauugcaagauguga

SEQ ID NO: 43913 - RNA, 20 nt, Artificial Sequence
  RPE65 RNA guide
ccaggaaaauccaaauagca

SEQ ID NO: 43914 - RNA, 20 nt, Artificial Sequence
  RPE65 RNA guide
ccaucauuugcacuucuuag

SEQ ID NO: 43915 - RNA, 20 nt, Artificial Sequence
  RPE65 RNA guide
ccaucuaaacuauauccuuu

SEQ ID NO: 43916 - RNA, 20 nt, Artificial Sequence
  RPE65 RNA guide
ccauucacuuacuagugagu

SEQ ID NO: 43917 - RNA, 20 nt, Artificial Sequence
  RPE65 RNA guide
ccauucugagguuucuuccc

SEQ ID NO: 43918 - RNA, 20 nt, Artificial Sequence
  RPE65 RNA guide
cccaaaggauauaguuuaga

SEQ ID NO: 43919 - RNA, 20 nt, Artificial Sequence
  RPE65 RNA guide
cccaccuccagcuauugcaa

SEQ ID NO: 43920 - RNA, 20 nt, Artificial Sequence
  RPE65 RNA guide
cccaggaaaauccaaauagc

SEQ ID NO: 43921 - RNA, 20 nt, Artificial Sequence
  RPE65 RNA guide
cccaucuaaacuauauccuu

SEQ ID NO: 43922 - RNA, 20 nt, Artificial Sequence
  RPE65 RNA guide
ccccucuaaaacaaucaaaa

SEQ ID NO: 43923 - RNA, 20 nt, Artificial Sequence
  RPE65 RNA guide
ccccugacuuaaaacccacc

SEQ ID NO: 43924 - RNA, 20 nt, Artificial Sequence
  RPE65 RNA guide
cccuacuccccugacuuaaa

SEQ ID NO: 43925 - RNA, 20 nt, Artificial Sequence
  RPE65 RNA guide
cccuauuugagugcacguuu

SEQ ID NO: 43926 - RNA, 20 nt, Artificial Sequence
  RPE65 RNA guide
cccucuaaaacaaucaaaau

SEQ ID NO: 43927 - RNA, 20 nt, Artificial Sequence
  RPE65 RNA guide
cccugacuuaaaacccaccu

SEQ ID NO: 43928 - RNA, 20 nt, Artificial Sequence
  RPE65 RNA guide
cccuguacaguaauucuuau

SEQ ID NO: 43929 - RNA, 20 nt, Artificial Sequence
  RPE65 RNA guide
ccuacuccccugacuuaaaa

SEQ ID NO: 43930 - RNA, 20 nt, Artificial Sequence
  RPE65 RNA guide
ccuauuugagugcacguuuc

SEQ ID NO: 43931 - RNA, 20 nt, Artificial Sequence
  RPE65 RNA guide
ccucagaauggucaaaaugc

SEQ ID NO: 43932 - RNA, 20 nt, Artificial Sequence
  RPE65 RNA guide
ccuccagcuauugcaagaug

SEQ ID NO: 43933 - RNA, 20 nt, Artificial Sequence
  RPE65 RNA guide
ccugacuuaaaacccaccuc

SEQ ID NO: 43934 - RNA, 20 nt, Artificial Sequence
  RPE65 RNA guide
ccugggugauuuugcagcuu

SEQ ID NO: 43935 - RNA, 20 nt, Artificial Sequence
  RPE65 RNA guide
ccuguacaguaauucuuaug

SEQ ID NO: 43936 - RNA, 20 nt, Artificial Sequence
  RPE65 RNA guide
ccuguauaagcuguucuaaa

SEQ ID NO: 43937 - RNA, 20 nt, Artificial Sequence
  RPE65 RNA guide
ccuuugggcaucuuaagaug

SEQ ID NO: 43938 - RNA, 20 nt, Artificial Sequence
  RPE65 RNA guide
ccuuuugcaacaucuuaaga

SEQ ID NO: 43939 - RNA, 20 nt, Artificial Sequence
  RPE65 RNA guide
cgugcacucaaauaggguug

SEQ ID NO: 43940 - RNA, 20 nt, Artificial Sequence
  RPE65 RNA guide
cguuuccaaaucugcugcua

SEQ ID NO: 43941 - RNA, 20 nt, Artificial Sequence
  RPE65 RNA guide
cuaaacuauauccuuugggc

SEQ ID NO: 43942 - RNA, 20 nt, Artificial Sequence
  RPE65 RNA guide
cuaaaguuugaggaccauuc

SEQ ID NO: 43943 - RNA, 20 nt, Artificial Sequence
  RPE65 RNA guide
cuaagaagugcaaaugaugg

SEQ ID NO: 43944 - RNA, 20 nt, Artificial Sequence
  RPE65 RNA guide
cuacacuccacuugccacaa

SEQ ID NO: 43945 - RNA, 20 nt, Artificial Sequence
  RPE65 RNA guide
cuacuccccugacuuaaaac

SEQ ID NO: 43946 - RNA, 20 nt, Artificial Sequence
  RPE65 RNA guide
cuaguaagugaaugguccuc

SEQ ID NO: 43947 - RNA, 20 nt, Artificial Sequence
  RPE65 RNA guide
cuauauccuuugggcaucuu

SEQ ID NO: 43948 - RNA, 20 nt, Artificial Sequence
  RPE65 RNA guide
cuauugacacaaacccaucu

SEQ ID NO: 43949 - RNA, 20 nt, Artificial Sequence
  RPE65 RNA guide
cuauugcaagaugugacucc

SEQ ID NO: 43950 - RNA, 20 nt, Artificial Sequence
  RPE65 RNA guide
cuauuugagugcacguuucc

SEQ ID NO: 43951 - RNA, 20 nt, Artificial Sequence
  RPE65 RNA guide
cuauuuggauuuuccugggu

SEQ ID NO: 43952 - RNA, 20 nt, Artificial Sequence
  RPE65 RNA guide
cucaaauaggguuguggcaa

SEQ ID NO: 43953 - RNA, 20 nt, Artificial Sequence
  RPE65 RNA guide
cucacuaguaagugaauggu

SEQ ID NO: 43954 - RNA, 20 nt, Artificial Sequence
  RPE65 RNA guide
cucagaauggucaaaaugcc

SEQ ID NO: 43955 - RNA, 20 nt, Artificial Sequence
  RPE65 RNA guide
cuccacuacacuccacuugc

SEQ ID NO: 43956 - RNA, 20 nt, Artificial Sequence
  RPE65 RNA guide
cuccacuugccacaacccua

SEQ ID NO: 43957 - RNA, 20 nt, Artificial Sequence
  RPE65 RNA guide
cuccagcuauugcaagaugu

SEQ ID NO: 43958 - RNA, 20 nt, Artificial Sequence
  RPE65 RNA guide
cuccaucauuugcacuucuu

SEQ ID NO: 43959 - RNA, 20 nt, Artificial Sequence
  RPE65 RNA guide
cuccccugacuuaaaaccca

SEQ ID NO: 43960 - RNA, 20 nt, Artificial Sequence
  RPE65 RNA guide
cucuuuaugugauucugaug

SEQ ID NO: 43961 - RNA, 20 nt, Artificial Sequence
  RPE65 RNA guide
cugacuuaaaacccaccucc

SEQ ID NO: 43962 - RNA, 20 nt, Artificial Sequence
  RPE65 RNA guide
cugagguuucuucccuacuc

SEQ ID NO: 43963 - RNA, 20 nt, Artificial Sequence
  RPE65 RNA guide
cugcaaaaucacccaggaaa

SEQ ID NO: 43964 - RNA, 20 nt, Artificial Sequence
  RPE65 RNA guide
cugcuauuuggauuuuccug

SEQ ID NO: 43965 - RNA, 20 nt, Artificial Sequence
  RPE65 RNA guide
cugcugcuauuuggauuuuc

SEQ ID NO: 43966 - RNA, 20 nt, Artificial Sequence
  RPE65 RNA guide
cuggagguggguuuuaaguc

SEQ ID NO: 43967 - RNA, 20 nt, Artificial Sequence
  RPE65 RNA guide
cugggugauuuugcagcuuc

SEQ ID NO: 43968 - RNA, 20 nt, Artificial Sequence
  RPE65 RNA guide
cuguacagggcuauugacac

SEQ ID NO: 43969 - RNA, 20 nt, Artificial Sequence
  RPE65 RNA guide
cuguacaguaauucuuaugc

SEQ ID NO: 43970 - RNA, 20 nt, Artificial Sequence
  RPE65 RNA guide
cuguauaagcuguucuaaau

SEQ ID NO: 43971 - RNA, 20 nt, Artificial Sequence
  RPE65 RNA guide
cuuaaaacccaccuccagcu

SEQ ID NO: 43972 - RNA, 20 nt, Artificial Sequence
  RPE65 RNA guide
cuuaagaugcccaaaggaua

SEQ ID NO: 43973 - RNA, 20 nt, Artificial Sequence
  RPE65 RNA guide
cuuaagauguugcaaaaggc

SEQ ID NO: 43974 - RNA, 20 nt, Artificial Sequence
  RPE65 RNA guide
cuuagugaaauuucauguga

SEQ ID NO: 43975 - RNA, 20 nt, Artificial Sequence
  RPE65 RNA guide
cuuauacaggcaaagaaaca

SEQ ID NO: 43976 - RNA, 20 nt, Artificial Sequence
  RPE65 RNA guide
cuuccaaagccuuuuaaaac

SEQ ID NO: 43977 - RNA, 20 nt, Artificial Sequence
  RPE65 RNA guide
cuucccuacuccccugacuu

SEQ ID NO: 43978 - RNA, 20 nt, Artificial Sequence
  RPE65 RNA guide
cuugcaauagcuggaggugg

SEQ ID NO: 43979 - RNA, 20 nt, Artificial Sequence
  RPE65 RNA guide
cuugccacaacccuauuuga

SEQ ID NO: 43980 - RNA, 20 nt, Artificial Sequence
  RPE65 RNA guide
cuuuagugugcaucagaauc

SEQ ID NO: 43981 - RNA, 20 nt, Artificial Sequence
  RPE65 RNA guide
cuuuaugugauucugaugca

SEQ ID NO: 43982 - RNA, 20 nt, Artificial Sequence
  RPE65 RNA guide
cuuugccuguauaagcuguu

SEQ ID NO: 43983 - RNA, 20 nt, Artificial Sequence
  RPE65 RNA guide
cuuugggcaucuuaagaugu

SEQ ID NO: 43984 - RNA, 20 nt, Artificial Sequence
  RPE65 RNA guide
cuuuugcaacaucuuaagau

SEQ ID NO: 43985 - RNA, 20 nt, Artificial Sequence
  RPE65 RNA guide
gaaaauaaccccucuaaaac

SEQ ID NO: 43986 - RNA, 20 nt, Artificial Sequence
  RPE65 RNA guide
gaaaauccaaauagcagcag

SEQ ID NO: 43987 - RNA, 20 nt, Artificial Sequence
  RPE65 RNA guide
gaaaccucagaauggucaaa

SEQ ID NO: 43988 - RNA, 20 nt, Artificial Sequence
  RPE65 RNA guide
gaaacgugcacucaaauagg

SEQ ID NO: 43989 - RNA, 20 nt, Artificial Sequence
  RPE65 RNA guide
gaaacucuuuaugugauucu

SEQ ID NO: 43990 - RNA, 20 nt, Artificial Sequence
  RPE65 RNA guide
gaaauuucaugugaagcugc

SEQ ID NO: 43991 - RNA, 20 nt, Artificial Sequence
  RPE65 RNA guide
gaacagcuuauacaggcaaa

SEQ ID NO: 43992 - RNA, 20 nt, Artificial Sequence
  RPE65 RNA guide
gaagaaaccucagaaugguc

SEQ ID NO: 43993 - RNA, 20 nt, Artificial Sequence
  RPE65 RNA guide
gaagcugcaaaaucacccag

SEQ ID NO: 43994 - RNA, 20 nt, Artificial Sequence
  RPE65 RNA guide
gaagugcaaaugauggagaa

SEQ ID NO: 43995 - RNA, 20 nt, Artificial Sequence
  RPE65 RNA guide
gaauggucaaaaugccuuuu

SEQ ID NO: 43996 - RNA, 20 nt, Artificial Sequence
  RPE65 RNA guide
gaaugguccucaaacuuuag

SEQ ID NO: 43997 - RNA, 20 nt, Artificial Sequence
  RPE65 RNA guide
gaauuacuguacagggcuau

SEQ ID NO: 43998 - RNA, 20 nt, Artificial Sequence
  RPE65 RNA guide
gacacaaacccaucuaaacu

SEQ ID NO: 43999 - RNA, 20 nt, Artificial Sequence
  RPE65 RNA guide
gaccauucacuuacuaguga

SEQ ID NO: 44000 - RNA, 20 nt, Artificial Sequence
  RPE65 RNA guide
gaccauucugagguuucuuc

SEQ ID NO: 44001 - RNA, 20 nt, Artificial Sequence
  RPE65 RNA guide
gacuccacuacacuccacuu

SEQ ID NO: 44002 - RNA, 20 nt, Artificial Sequence
  RPE65 RNA guide
gacuuaaaacccaccuccag

SEQ ID NO: 44003 - RNA, 20 nt, Artificial Sequence
  RPE65 RNA guide
gagaaaaugaaaauaacccc

SEQ ID NO: 44004 - RNA, 20 nt, Artificial Sequence
  RPE65 RNA guide
gaggaccauucacuuacuag

SEQ ID NO: 44005 - RNA, 20 nt, Artificial Sequence
  RPE65 RNA guide
gagggguuauuuucauuuuc

SEQ ID NO: 44006 - RNA, 20 nt, Artificial Sequence
  RPE65 RNA guide
gagguggguuuuaagucagg

SEQ ID NO: 44007 - RNA, 20 nt, Artificial Sequence
  RPE65 RNA guide
gagguuucuucccuacuccc

SEQ ID NO: 44008 - RNA, 20 nt, Artificial Sequence
  RPE65 RNA guide
gaguagggaagaaaccucag

SEQ ID NO: 44009 - RNA, 20 nt, Artificial Sequence
  RPE65 RNA guide
gagucacaucuugcaauagc

SEQ ID NO: 44010 - RNA, 20 nt, Artificial Sequence
  RPE65 RNA guide
gagugcacguuuccaaaucu

SEQ ID NO: 44011 - RNA, 20 nt, Artificial Sequence
  RPE65 RNA guide
gaguguaguggagucacauc

SEQ ID NO: 44012 - RNA, 20 nt, Artificial Sequence
  RPE65 RNA guide
gauauaguuuagauggguuu

SEQ ID NO: 44013 - RNA, 20 nt, Artificial Sequence
  RPE65 RNA guide
gaugcccaaaggauauaguu

SEQ ID NO: 44014 - RNA, 20 nt, Artificial Sequence
  RPE65 RNA guide
gauggagaaaaugaaaauaa

SEQ ID NO: 44015 - RNA, 20 nt, Artificial Sequence
  RPE65 RNA guide
gauggguuugugucaauagc

SEQ ID NO: 44016 - RNA, 20 nt, Artificial Sequence
  RPE65 RNA guide
gaugugacuccacuacacuc

SEQ ID NO: 44017 - RNA, 20 nt, Artificial Sequence
  RPE65 RNA guide
gauguugcaaaaggcauuuu

SEQ ID NO: 44018 - RNA, 20 nt, Artificial Sequence
  RPE65 RNA guide
gauuguuuuagagggguuau

SEQ ID NO: 44019 - RNA, 20 nt, Artificial Sequence
  RPE65 RNA guide
gauuuggaaacgugcacuca

SEQ ID NO: 44020 - RNA, 20 nt, Artificial Sequence
  RPE65 RNA guide
gauuuuccugggugauuuug

SEQ ID NO: 44021 - RNA, 20 nt, Artificial Sequence
  RPE65 RNA guide
gauuuugcagcuucacauga

SEQ ID NO: 44022 - RNA, 20 nt, Artificial Sequence
  RPE65 RNA guide
gcaaaaggcauuuugaccau

SEQ ID NO: 44023 - RNA, 20 nt, Artificial Sequence
  RPE65 RNA guide
gcaaaaucacccaggaaaau

SEQ ID NO: 44024 - RNA, 20 nt, Artificial Sequence
  RPE65 RNA guide
gcaacaucuuaagaugccca

SEQ ID NO: 44025 - RNA, 20 nt, Artificial Sequence
  RPE65 RNA guide
gcaagaugugacuccacuac

SEQ ID NO: 44026 - RNA, 20 nt, Artificial Sequence
  RPE65 RNA guide
gcaaguggaguguaguggag

SEQ ID NO: 44027 - RNA, 20 nt, Artificial Sequence
  RPE65 RNA guide
gcaauagcuggagguggguu

SEQ ID NO: 44028 - RNA, 20 nt, Artificial Sequence
  RPE65 RNA guide
gcacacuaaaguuugaggac

SEQ ID NO: 44029 - RNA, 20 nt, Artificial Sequence
  RPE65 RNA guide
gcacguuuccaaaucugcug

SEQ ID NO: 44030 - RNA, 20 nt, Artificial Sequence
  RPE65 RNA guide
gcacucaaauaggguugugg

SEQ ID NO: 44031 - RNA, 20 nt, Artificial Sequence
  RPE65 RNA guide
gcacuucuuagugaaauuuc

SEQ ID NO: 44032 - RNA, 20 nt, Artificial Sequence
  RPE65 RNA guide
gcagauuuggaaacgugcac

SEQ ID NO: 44033 - RNA, 20 nt, Artificial Sequence
  RPE65 RNA guide
gcagcagauuuggaaacgug

SEQ ID NO: 44034 - RNA, 20 nt, Artificial Sequence
  RPE65 RNA guide
gcagcuucacaugaaauuuc

SEQ ID NO: 44035 - RNA, 20 nt, Artificial Sequence
  RPE65 RNA guide
gcauaagaauuacuguacag

SEQ ID NO: 44036 - RNA, 20 nt, Artificial Sequence
  RPE65 RNA guide
gcaucagaaucacauaaaga

SEQ ID NO: 44037 - RNA, 20 nt, Artificial Sequence
  RPE65 RNA guide
gcaucuuaagauguugcaaa

SEQ ID NO: 44038 - RNA, 20 nt, Artificial Sequence
  RPE65 RNA guide
gcauuuagaacagcuuauac

SEQ ID NO: 44039 - RNA, 20 nt, Artificial Sequence
  RPE65 RNA guide
gcauuuugaccauucugagg

SEQ ID NO: 44040 - RNA, 20 nt, Artificial Sequence
  RPE65 RNA guide
gccacaacccuauuugagug

SEQ ID NO: 44041 - RNA, 20 nt, Artificial Sequence
  RPE65 RNA guide
gcccaaaggauauaguuuag

SEQ ID NO: 44042 - RNA, 20 nt, Artificial Sequence
  RPE65 RNA guide
gcccuguacaguaauucuua

SEQ ID NO: 44043 - RNA, 20 nt, Artificial Sequence
  RPE65 RNA guide
gccuguauaagcuguucuaa

SEQ ID NO: 44044 - RNA, 20 nt, Artificial Sequence
  RPE65 RNA guide
gccuuuugcaacaucuuaag

SEQ ID NO: 44045 - RNA, 20 nt, Artificial Sequence
  RPE65 RNA guide
gcuauugacacaaacccauc

SEQ ID NO: 44046 - RNA, 20 nt, Artificial Sequence
  RPE65 RNA guide
gcuauugcaagaugugacuc

SEQ ID NO: 44047 - RNA, 20 nt, Artificial Sequence
  RPE65 RNA guide
gcuauuuggauuuuccuggg

SEQ ID NO: 44048 - RNA, 20 nt, Artificial Sequence
  RPE65 RNA guide
gcugcaaaaucacccaggaa

SEQ ID NO: 44049 - RNA, 20 nt, Artificial Sequence
  RPE65 RNA guide
gcugcuauuuggauuuuccu

SEQ ID NO: 44050 - RNA, 20 nt, Artificial Sequence
  RPE65 RNA guide
gcuggagguggguuuuaagu

SEQ ID NO: 44051 - RNA, 20 nt, Artificial Sequence
  RPE65 RNA guide
gcuuauacaggcaaagaaac

SEQ ID NO: 44052 - RNA, 20 nt, Artificial Sequence
  RPE65 RNA guide
gcuucacaugaaauuucacu

SEQ ID NO: 44053 - RNA, 20 nt, Artificial Sequence
  RPE65 RNA guide
ggaaaauccaaauagcagca

SEQ ID NO: 44054 - RNA, 20 nt, Artificial Sequence
  RPE65 RNA guide
ggaaacgugcacucaaauag

SEQ ID NO: 44055 - RNA, 20 nt, Artificial Sequence
  RPE65 RNA guide
ggaagaaaccucagaauggu

SEQ ID NO: 44056 - RNA, 20 nt, Artificial Sequence
  RPE65 RNA guide
ggaccauucacuuacuagug

SEQ ID NO: 44057 - RNA, 20 nt, Artificial Sequence
  RPE65 RNA guide
ggagaaaaugaaaauaaccc

SEQ ID NO: 44058 - RNA, 20 nt, Artificial Sequence
  RPE65 RNA guide
ggagguggguuuuaagucag

SEQ ID NO: 44059 - RNA, 20 nt, Artificial Sequence
  RPE65 RNA guide
ggaguagggaagaaaccuca

SEQ ID NO: 44060 - RNA, 20 nt, Artificial Sequence
  RPE65 RNA guide
ggagucacaucuugcaauag

SEQ ID NO: 44061 - RNA, 20 nt, Artificial Sequence
  RPE65 RNA guide
ggaguguaguggagucacau

SEQ ID NO: 44062 - RNA, 20 nt, Artificial Sequence
  RPE65 RNA guide
ggauauaguuuagauggguu

SEQ ID NO: 44063 - RNA, 20 nt, Artificial Sequence
  RPE65 RNA guide
ggauuuuccugggugauuuu

SEQ ID NO: 44064 - RNA, 20 nt, Artificial Sequence
  RPE65 RNA guide
ggcaaagaaacacauuuuga

SEQ ID NO: 44065 - RNA, 20 nt, Artificial Sequence
  RPE65 RNA guide
ggcaaguggaguguagugga

SEQ ID NO: 44066 - RNA, 20 nt, Artificial Sequence
  RPE65 RNA guide
ggcaucuuaagauguugcaa

SEQ ID NO: 44067 - RNA, 20 nt, Artificial Sequence
  RPE65 RNA guide
ggcauuuugaccauucugag

SEQ ID NO: 44068 - RNA, 20 nt, Artificial Sequence
  RPE65 RNA guide
ggcuauugacacaaacccau

SEQ ID NO: 44069 - RNA, 20 nt, Artificial Sequence
  RPE65 RNA guide
gggaagaaaccucagaaugg

SEQ ID NO: 44070 - RNA, 20 nt, Artificial Sequence
  RPE65 RNA guide
gggaguagggaagaaaccuc

SEQ ID NO: 44071 - RNA, 20 nt, Artificial Sequence
  RPE65 RNA guide
gggcaucuuaagauguugca

SEQ ID NO: 44072 - RNA, 20 nt, Artificial Sequence
  RPE65 RNA guide
gggcuauugacacaaaccca

SEQ ID NO: 44073 - RNA, 20 nt, Artificial Sequence
  RPE65 RNA guide
ggggaguagggaagaaaccu

SEQ ID NO: 44074 - RNA, 20 nt, Artificial Sequence
  RPE65 RNA guide
gggguuauuuucauuuucuc

SEQ ID NO: 44075 - RNA, 20 nt, Artificial Sequence
  RPE65 RNA guide
gggugauuuugcagcuucac

SEQ ID NO: 44076 - RNA, 20 nt, Artificial Sequence
  RPE65 RNA guide
ggguuauuuucauuuucucc

SEQ ID NO: 44077 - RNA, 20 nt, Artificial Sequence
  RPE65 RNA guide
ggguuguggcaaguggagug

SEQ ID NO: 44078 - RNA, 20 nt, Artificial Sequence
  RPE65 RNA guide
ggguuugugucaauagcccu

SEQ ID NO: 44079 - RNA, 20 nt, Artificial Sequence
  RPE65 RNA guide
ggguuuuaagucaggggagu

SEQ ID NO: 44080 - RNA, 20 nt, Artificial Sequence
  RPE65 RNA guide
ggucaaaaugccuuuugcaa

SEQ ID NO: 44081 - RNA, 20 nt, Artificial Sequence
  RPE65 RNA guide
ggugauuuugcagcuucaca

SEQ ID NO: 44082 - RNA, 20 nt, Artificial Sequence
  RPE65 RNA guide
gguggguuuuaagucagggg

SEQ ID NO: 44083 - RNA, 20 nt, Artificial Sequence
  RPE65 RNA guide
gguuguggcaaguggagugu

SEQ ID NO: 44084 - RNA, 20 nt, Artificial Sequence
  RPE65 RNA guide
gguuucuucccuacuccccu

SEQ ID NO: 44085 - RNA, 20 nt, Artificial Sequence
  RPE65 RNA guide
gguuugugucaauagcccug

SEQ ID NO: 44086 - RNA, 20 nt, Artificial Sequence
  RPE65 RNA guide
gguuuuaagucaggggagua

SEQ ID NO: 44087 - RNA, 20 nt, Artificial Sequence
  RPE65 RNA guide
guaagugaaugguccucaaa

SEQ ID NO: 44088 - RNA, 20 nt, Artificial Sequence
  RPE65 RNA guide
guacagggcuauugacacaa

SEQ ID NO: 44089 - RNA, 20 nt, Artificial Sequence
  RPE65 RNA guide
guagggaagaaaccucagaa

SEQ ID NO: 44090 - RNA, 20 nt, Artificial Sequence
  RPE65 RNA guide
guaguggagucacaucuugc

SEQ ID NO: 44091 - RNA, 20 nt, Artificial Sequence
  RPE65 RNA guide
guauaagcuguucuaaaugc

SEQ ID NO: 44092 - RNA, 20 nt, Artificial Sequence
  RPE65 RNA guide
gucaaaaugccuuuugcaac

SEQ ID NO: 44093 - RNA, 20 nt, Artificial Sequence
  RPE65 RNA guide
gucaauagcccuguacagua

SEQ ID NO: 44094 - RNA, 20 nt, Artificial Sequence
  RPE65 RNA guide
gucacaucuugcaauagcug

SEQ ID NO: 44095 - RNA, 20 nt, Artificial Sequence
  RPE65 RNA guide
gucaggggaguagggaagaa

SEQ ID NO: 44096 - RNA, 20 nt, Artificial Sequence
  RPE65 RNA guide
gugaaauuucaugugaagcu

SEQ ID NO: 44097 - RNA, 20 nt, Artificial Sequence
  RPE65 RNA guide
gugaagcugcaaaaucaccc

SEQ ID NO: 44098 - RNA, 20 nt, Artificial Sequence
  RPE65 RNA guide
gugaaugguccucaaacuuu

SEQ ID NO: 44099 - RNA, 20 nt, Artificial Sequence
  RPE65 RNA guide
gugacuccacuacacuccac

SEQ ID NO: 44100 - RNA, 20 nt, Artificial Sequence
  RPE65 RNA guide
gugauuuugcagcuucacau

SEQ ID NO: 44101 - RNA, 20 nt, Artificial Sequence
  RPE65 RNA guide
gugcaaaugauggagaaaau

SEQ ID NO: 44102 - RNA, 20 nt, Artificial Sequence
  RPE65 RNA guide
gugcacguuuccaaaucugc

SEQ ID NO: 44103 - RNA, 20 nt, Artificial Sequence
  RPE65 RNA guide
gugcacucaaauaggguugu

SEQ ID NO: 44104 - RNA, 20 nt, Artificial Sequence
  RPE65 RNA guide
gugcauaagaauuacuguac

SEQ ID NO: 44105 - RNA, 20 nt, Artificial Sequence
  RPE65 RNA guide
gugcaucagaaucacauaaa

SEQ ID NO: 44106 - RNA, 20 nt, Artificial Sequence
  RPE65 RNA guide
guggagucacaucuugcaau

SEQ ID NO: 44107 - RNA, 20 nt, Artificial Sequence
  RPE65 RNA guide
guggaguguaguggagucac

SEQ ID NO: 44108 - RNA, 20 nt, Artificial Sequence
  RPE65 RNA guide
guggcaaguggaguguagug

SEQ ID NO: 44109 - RNA, 20 nt, Artificial Sequence
  RPE65 RNA guide
guggguuuuaagucagggga

SEQ ID NO: 44110 - RNA, 20 nt, Artificial Sequence
  RPE65 RNA guide
guguaguggagucacaucuu

SEQ ID NO: 44111 - RNA, 20 nt, Artificial Sequence
  RPE65 RNA guide
gugucaauagcccuguacag

SEQ ID NO: 44112 - RNA, 20 nt, Artificial Sequence
  RPE65 RNA guide
gugugcaucagaaucacaua

SEQ ID NO: 44113 - RNA, 20 nt, Artificial Sequence
  RPE65 RNA guide
guguuucuuugccuguauaa

SEQ ID NO: 44114 - RNA, 20 nt, Artificial Sequence
  RPE65 RNA guide
guugcaaaaggcauuuugac

SEQ ID NO: 44115 - RNA, 20 nt, Artificial Sequence
  RPE65 RNA guide
guuguggcaaguggagugua

SEQ ID NO: 44116 - RNA, 20 nt, Artificial Sequence
  RPE65 RNA guide
guuuagauggguuuguguca

SEQ ID NO: 44117 - RNA, 20 nt, Artificial Sequence
  RPE65 RNA guide
guuuccaaaucugcugcuau

SEQ ID NO: 44118 - RNA, 20 nt, Artificial Sequence
  RPE65 RNA guide
guuucuucccuacuccccug

SEQ ID NO: 44119 - RNA, 20 nt, Artificial Sequence
  RPE65 RNA guide
guuucuuugccuguauaagc

SEQ ID NO: 44120 - RNA, 20 nt, Artificial Sequence
  RPE65 RNA guide
guuugaggaccauucacuua

SEQ ID NO: 44121 - RNA, 20 nt, Artificial Sequence
  RPE65 RNA guide
guuugugucaauagcccugu

SEQ ID NO: 44122 - RNA, 20 nt, Artificial Sequence
  RPE65 RNA guide
guuuuaagucaggggaguag

SEQ ID NO: 44123 - RNA, 20 nt, Artificial Sequence
  RPE65 RNA guide
uaaaacccaccuccagcuau

SEQ ID NO: 44124 - RNA, 20 nt, Artificial Sequence
  RPE65 RNA guide
uaaacuauauccuuugggca

SEQ ID NO: 44125 - RNA, 20 nt, Artificial Sequence
  RPE65 RNA guide
uaaagugguuuuaaaaggcu

SEQ ID NO: 44126 - RNA, 20 nt, Artificial Sequence
  RPE65 RNA guide
uaaaguuugaggaccauuca

SEQ ID NO: 44127 - RNA, 20 nt, Artificial Sequence
  RPE65 RNA guide
uaagaagugcaaaugaugga

SEQ ID NO: 44128 - RNA, 20 nt, Artificial Sequence
  RPE65 RNA guide
uaagaauuacuguacagggc

SEQ ID NO: 44129 - RNA, 20 nt, Artificial Sequence
  RPE65 RNA guide
uaagaugcccaaaggauaua

SEQ ID NO: 44130 - RNA, 20 nt, Artificial Sequence
  RPE65 RNA guide
uaagauguugcaaaaggcau

SEQ ID NO: 44131 - RNA, 20 nt, Artificial Sequence
  RPE65 RNA guide
uaagucaggggaguagggaa

SEQ ID NO: 44132 - RNA, 20 nt, Artificial Sequence
  RPE65 RNA guide
uaagugaaugguccucaaac

SEQ ID NO: 44133 - RNA, 20 nt, Artificial Sequence
  RPE65 RNA guide
uacacuccacuugccacaac

SEQ ID NO: 44134 - RNA, 20 nt, Artificial Sequence
  RPE65 RNA guide
uacaggcaaagaaacacauu

SEQ ID NO: 44135 - RNA, 20 nt, Artificial Sequence
  RPE65 RNA guide
uacagggcuauugacacaaa

SEQ ID NO: 44136 - RNA, 20 nt, Artificial Sequence
  RPE65 RNA guide
uacucacuaguaagugaaug

SEQ ID NO: 44137 - RNA, 20 nt, Artificial Sequence
  RPE65 RNA guide
uacuccccugacuuaaaacc

SEQ ID NO: 44138 - RNA, 20 nt, Artificial Sequence
  RPE65 RNA guide
uacuguacagggcuauugac

SEQ ID NO: 44139 - RNA, 20 nt, Artificial Sequence
  RPE65 RNA guide
uagaacagcuuauacaggca

SEQ ID NO: 44140 - RNA, 20 nt, Artificial Sequence
  RPE65 RNA guide
uagagggguuauuuucauuu

SEQ ID NO: 44141 - RNA, 20 nt, Artificial Sequence
  RPE65 RNA guide
uagauggguuugugucaaua

SEQ ID NO: 44142 - RNA, 20 nt, Artificial Sequence
  RPE65 RNA guide
uagcagcagauuuggaaacg

SEQ ID NO: 44143 - RNA, 20 nt, Artificial Sequence
  RPE65 RNA guide
uagcccuguacaguaauucu

SEQ ID NO: 44144 - RNA, 20 nt, Artificial Sequence
  RPE65 RNA guide
uagcuggagguggguuuuaa

SEQ ID NO: 44145 - RNA, 20 nt, Artificial Sequence
  RPE65 RNA guide
uagggaagaaaccucagaau

SEQ ID NO: 44146 - RNA, 20 nt, Artificial Sequence
  RPE65 RNA guide
uaggguuguggcaaguggag

SEQ ID NO: 44147 - RNA, 20 nt, Artificial Sequence
  RPE65 RNA guide
uaguaagugaaugguccuca

SEQ ID NO: 44148 - RNA, 20 nt, Artificial Sequence
  RPE65 RNA guide
uagugaaauuucaugugaag

SEQ ID NO: 44149 - RNA, 20 nt, Artificial Sequence
  RPE65 RNA guide
uaguggagucacaucuugca

SEQ ID NO: 44150 - RNA, 20 nt, Artificial Sequence
  RPE65 RNA guide
uagugugcaucagaaucaca

SEQ ID NO: 44151 - RNA, 20 nt, Artificial Sequence
  RPE65 RNA guide
uaguuuagauggguuugugu

SEQ ID NO: 44152 - RNA, 20 nt, Artificial Sequence
  RPE65 RNA guide
uauaguuuagauggguuugu

SEQ ID NO: 44153 - RNA, 20 nt, Artificial Sequence
  RPE65 RNA guide
uauauccuuugggcaucuua

SEQ ID NO: 44154 - RNA, 20 nt, Artificial Sequence
  RPE65 RNA guide
uauccuuugggcaucuuaag

SEQ ID NO: 44155 - RNA, 20 nt, Artificial Sequence
  RPE65 RNA guide
uaugugauucugaugcacac

SEQ ID NO: 44156 - RNA, 20 nt, Artificial Sequence
  RPE65 RNA guide
uauugacacaaacccaucua

SEQ ID NO: 44157 - RNA, 20 nt, Artificial Sequence
  RPE65 RNA guide
uauugcaagaugugacucca

SEQ ID NO: 44158 - RNA, 20 nt, Artificial Sequence
  RPE65 RNA guide
uauuugagugcacguuucca

SEQ ID NO: 44159 - RNA, 20 nt, Artificial Sequence
  RPE65 RNA guide
uauuuggauuuuccugggug

SEQ ID NO: 44160 - RNA, 20 nt, Artificial Sequence
  RPE65 RNA guide
ucaaaaugccuuuugcaaca

SEQ ID NO: 44161 - RNA, 20 nt, Artificial Sequence
  RPE65 RNA guide
ucaaaauguguuucuuugcc

SEQ ID NO: 44162 - RNA, 20 nt, Artificial Sequence
  RPE65 RNA guide
ucaaauaggguuguggcaag

SEQ ID NO: 44163 - RNA, 20 nt, Artificial Sequence
  RPE65 RNA guide
ucaauagcccuguacaguaa

SEQ ID NO: 44164 - RNA, 20 nt, Artificial Sequence
  RPE65 RNA guide
ucacaucuugcaauagcugg

SEQ ID NO: 44165 - RNA, 20 nt, Artificial Sequence
  RPE65 RNA guide
ucacccaggaaaauccaaau

SEQ ID NO: 44166 - RNA, 20 nt, Artificial Sequence
  RPE65 RNA guide
ucacuaagaagugcaaauga

SEQ ID NO: 44167 - RNA, 20 nt, Artificial Sequence
  RPE65 RNA guide
ucacuaguaagugaaugguc

SEQ ID NO: 44168 - RNA, 20 nt, Artificial Sequence
  RPE65 RNA guide
ucagaauggucaaaaugccu

SEQ ID NO: 44169 - RNA, 20 nt, Artificial Sequence
  RPE65 RNA guide
ucaggggaguagggaagaaa

SEQ ID NO: 44170 - RNA, 20 nt, Artificial Sequence
  RPE65 RNA guide
ucaugugaagcugcaaaauc

SEQ ID NO: 44171 - RNA, 20 nt, Artificial Sequence
  RPE65 RNA guide
ucauuuucuccaucauuugc

SEQ ID NO: 44172 - RNA, 20 nt, Artificial Sequence
  RPE65 RNA guide
uccaaagccuuuuaaaacca

SEQ ID NO: 44173 - RNA, 20 nt, Artificial Sequence
  RPE65 RNA guide
uccaaauagcagcagauuug

SEQ ID NO: 44174 - RNA, 20 nt, Artificial Sequence
  RPE65 RNA guide
uccaaaucugcugcuauuug

SEQ ID NO: 44175 - RNA, 20 nt, Artificial Sequence
  RPE65 RNA guide
uccacuacacuccacuugcc

SEQ ID NO: 44176 - RNA, 20 nt, Artificial Sequence
  RPE65 RNA guide
uccacuugccacaacccuau

SEQ ID NO: 44177 - RNA, 20 nt, Artificial Sequence
  RPE65 RNA guide
uccagcuauugcaagaugug

SEQ ID NO: 44178 - RNA, 20 nt, Artificial Sequence
  RPE65 RNA guide
uccaucauuugcacuucuua

SEQ ID NO: 44179 - RNA, 20 nt, Artificial Sequence
  RPE65 RNA guide
uccccugacuuaaaacccac

SEQ ID NO: 44180 - RNA, 20 nt, Artificial Sequence
  RPE65 RNA guide
ucccuacuccccugacuuaa

SEQ ID NO: 44181 - RNA, 20 nt, Artificial Sequence
  RPE65 RNA guide
uccugggugauuuugcagcu

SEQ ID NO: 44182 - RNA, 20 nt, Artificial Sequence
  RPE65 RNA guide
uccuuugggcaucuuaagau

SEQ ID NO: 44183 - RNA, 20 nt, Artificial Sequence
  RPE65 RNA guide
ucuaaacuauauccuuuggg

SEQ ID NO: 44184 - RNA, 20 nt, Artificial Sequence
  RPE65 RNA guide
ucuccaucauuugcacuucu

SEQ ID NO: 44185 - RNA, 20 nt, Artificial Sequence
  RPE65 RNA guide
ucugagguuucuucccuacu

SEQ ID NO: 44186 - RNA, 20 nt, Artificial Sequence
  RPE65 RNA guide
ucugcugcuauuuggauuuu

SEQ ID NO: 44187 - RNA, 20 nt, Artificial Sequence
  RPE65 RNA guide
ucuuaagaugcccaaaggau

SEQ ID NO: 44188 - RNA, 20 nt, Artificial Sequence
  RPE65 RNA guide
ucuuaagauguugcaaaagg

SEQ ID NO: 44189 - RNA, 20 nt, Artificial Sequence
  RPE65 RNA guide
ucuuagugaaauuucaugug

SEQ ID NO: 44190 - RNA, 20 nt, Artificial Sequence
  RPE65 RNA guide
ucuucccuacuccccugacu

SEQ ID NO: 44191 - RNA, 20 nt, Artificial Sequence
  RPE65 RNA guide
ucuugcaauagcuggaggug

SEQ ID NO: 44192 - RNA, 20 nt, Artificial Sequence
  RPE65 RNA guide
ucuuuaugugauucugaugc

SEQ ID NO: 44193 - RNA, 20 nt, Artificial Sequence
  RPE65 RNA guide
ucuuugccuguauaagcugu

SEQ ID NO: 44194 - RNA, 20 nt, Artificial Sequence
  RPE65 RNA guide
ugaaauuucaugugaagcug

SEQ ID NO: 44195 - RNA, 20 nt, Artificial Sequence
  RPE65 RNA guide
ugaagcugcaaaaucaccca

SEQ ID NO: 44196 - RNA, 20 nt, Artificial Sequence
  RPE65 RNA guide
ugaaugguccucaaacuuua

SEQ ID NO: 44197 - RNA, 20 nt, Artificial Sequence
  RPE65 RNA guide
ugacacaaacccaucuaaac

SEQ ID NO: 44198 - RNA, 20 nt, Artificial Sequence
  RPE65 RNA guide
ugaccauucugagguuucuu

SEQ ID NO: 44199 - RNA, 20 nt, Artificial Sequence
  RPE65 RNA guide
ugacuccacuacacuccacu

SEQ ID NO: 44200 - RNA, 20 nt, Artificial Sequence
  RPE65 RNA guide
ugacuuaaaacccaccucca

SEQ ID NO: 44201 - RNA, 20 nt, Artificial Sequence
  RPE65 RNA guide
ugaggaccauucacuuacua

SEQ ID NO: 44202 - RNA, 20 nt, Artificial Sequence
  RPE65 RNA guide
ugagguuucuucccuacucc

SEQ ID NO: 44203 - RNA, 20 nt, Artificial Sequence
  RPE65 RNA guide
ugagugcacguuuccaaauc

SEQ ID NO: 44204 - RNA, 20 nt, Artificial Sequence
  RPE65 RNA guide
ugauggagaaaaugaaaaua

SEQ ID NO: 44205 - RNA, 20 nt, Artificial Sequence
  RPE65 RNA guide
ugauuuugcagcuucacaug

SEQ ID NO: 44206 - RNA, 20 nt, Artificial Sequence
  RPE65 RNA guide
ugcaaaaggcauuuugacca

SEQ ID NO: 44207 - RNA, 20 nt, Artificial Sequence
  RPE65 RNA guide
ugcaaaaucacccaggaaaa

SEQ ID NO: 44208 - RNA, 20 nt, Artificial Sequence
  RPE65 RNA guide
ugcaacaucuuaagaugccc

SEQ ID NO: 44209 - RNA, 20 nt, Artificial Sequence
  RPE65 RNA guide
ugcaagaugugacuccacua

SEQ ID NO: 44210 - RNA, 20 nt, Artificial Sequence
  RPE65 RNA guide
ugcaauagcuggaggugggu

SEQ ID NO: 44211 - RNA, 20 nt, Artificial Sequence
  RPE65 RNA guide
ugcacacuaaaguuugagga

SEQ ID NO: 44212 - RNA, 20 nt, Artificial Sequence
  RPE65 RNA guide
ugcacguuuccaaaucugcu

SEQ ID NO: 44213 - RNA, 20 nt, Artificial Sequence
  RPE65 RNA guide
ugcacucaaauaggguugug

SEQ ID NO: 44214 - RNA, 20 nt, Artificial Sequence
  RPE65 RNA guide
ugcacuucuuagugaaauuu

SEQ ID NO: 44215 - RNA, 20 nt, Artificial Sequence
  RPE65 RNA guide
ugcagcuucacaugaaauuu

SEQ ID NO: 44216 - RNA, 20 nt, Artificial Sequence
  RPE65 RNA guide
ugcauaagaauuacuguaca

SEQ ID NO: 44217 - RNA, 20 nt, Artificial Sequence
  RPE65 RNA guide
ugcaucagaaucacauaaag

SEQ ID NO: 44218 - RNA, 20 nt, Artificial Sequence
  RPE65 RNA guide
ugccacaacccuauuugagu

SEQ ID NO: 44219 - RNA, 20 nt, Artificial Sequence
  RPE65 RNA guide
ugcccaaaggauauaguuua

SEQ ID NO: 44220 - RNA, 20 nt, Artificial Sequence
  RPE65 RNA guide
ugccuguauaagcuguucua

SEQ ID NO: 44221 - RNA, 20 nt, Artificial Sequence
  RPE65 RNA guide
ugccuuuugcaacaucuuaa

SEQ ID NO: 44222 - RNA, 20 nt, Artificial Sequence
  RPE65 RNA guide
ugcuauuuggauuuuccugg

SEQ ID NO: 44223 - RNA, 20 nt, Artificial Sequence
  RPE65 RNA guide
ugcugcuauuuggauuuucc

SEQ ID NO: 44224 - RNA, 20 nt, Artificial Sequence
  RPE65 RNA guide
uggaaacgugcacucaaaua

SEQ ID NO: 44225 - RNA, 20 nt, Artificial Sequence
  RPE65 RNA guide
uggagaaaaugaaaauaacc

SEQ ID NO: 44226 - RNA, 20 nt, Artificial Sequence
  RPE65 RNA guide
uggagguggguuuuaaguca

SEQ ID NO: 44227 - RNA, 20 nt, Artificial Sequence
  RPE65 RNA guide
uggagucacaucuugcaaua

SEQ ID NO: 44228 - RNA, 20 nt, Artificial Sequence
  RPE65 RNA guide
uggaguguaguggagucaca

SEQ ID NO: 44229 - RNA, 20 nt, Artificial Sequence
  RPE65 RNA guide
uggauuuuccugggugauuu

SEQ ID NO: 44230 - RNA, 20 nt, Artificial Sequence
  RPE65 RNA guide
uggcaaguggaguguagugg

SEQ ID NO: 44231 - RNA, 20 nt, Artificial Sequence
  RPE65 RNA guide
ugggcaucuuaagauguugc

SEQ ID NO: 44232 - RNA, 20 nt, Artificial Sequence
  RPE65 RNA guide
ugggugauuuugcagcuuca

SEQ ID NO: 44233 - RNA, 20 nt, Artificial Sequence
  RPE65 RNA guide
uggguuugugucaauagccc

SEQ ID NO: 44234 - RNA, 20 nt, Artificial Sequence
  RPE65 RNA guide
uggguuuuaagucaggggag

SEQ ID NO: 44235 - RNA, 20 nt, Artificial Sequence
  RPE65 RNA guide
uggucaaaaugccuuuugca

SEQ ID NO: 44236 - RNA, 20 nt, Artificial Sequence
  RPE65 RNA guide
ugguccucaaacuuuagugu

SEQ ID NO: 44237 - RNA, 20 nt, Artificial Sequence
  RPE65 RNA guide
uguacagggcuauugacaca

SEQ ID NO: 44238 - RNA, 20 nt, Artificial Sequence
  RPE65 RNA guide
uguaguggagucacaucuug

SEQ ID NO: 44239 - RNA, 20 nt, Artificial Sequence
  RPE65 RNA guide
ugucaauagcccuguacagu

SEQ ID NO: 44240 - RNA, 20 nt, Artificial Sequence
  RPE65 RNA guide
ugugaagcugcaaaaucacc

SEQ ID NO: 44241 - RNA, 20 nt, Artificial Sequence
  RPE65 RNA guide
ugugacuccacuacacucca

SEQ ID NO: 44242 - RNA, 20 nt, Artificial Sequence
  RPE65 RNA guide
ugugauucugaugcacacua

SEQ ID NO: 44243 - RNA, 20 nt, Artificial Sequence
  RPE65 RNA guide
ugugcauaagaauuacugua

SEQ ID NO: 44244 - RNA, 20 nt, Artificial Sequence
  RPE65 RNA guide
ugugcaucagaaucacauaa

SEQ ID NO: 44245 - RNA, 20 nt, Artificial Sequence
  RPE65 RNA guide
uguggcaaguggaguguagu

SEQ ID NO: 44246 - RNA, 20 nt, Artificial Sequence
  RPE65 RNA guide
ugugucaauagcccuguaca

SEQ ID NO: 44247 - RNA, 20 nt, Artificial Sequence
  RPE65 RNA guide
uguguuucuuugccuguaua

SEQ ID NO: 44248 - RNA, 20 nt, Artificial Sequence
  RPE65 RNA guide
uguugcaaaaggcauuuuga

SEQ ID NO: 44249 - RNA, 20 nt, Artificial Sequence
  RPE65 RNA guide
uguuucuuugccuguauaag

SEQ ID NO: 44250 - RNA, 20 nt, Artificial Sequence
  RPE65 RNA guide
uuaaaacccaccuccagcua

SEQ ID NO: 44251 - RNA, 20 nt, Artificial Sequence
  RPE65 RNA guide
uuaagaugcccaaaggauau

SEQ ID NO: 44252 - RNA, 20 nt, Artificial Sequence
  RPE65 RNA guide
uuaagucaggggaguaggga

SEQ ID NO: 44253 - RNA, 20 nt, Artificial Sequence
  RPE65 RNA guide
uuacucacuaguaagugaau

SEQ ID NO: 44254 - RNA, 20 nt, Artificial Sequence
  RPE65 RNA guide
uuacuguacagggcuauuga

SEQ ID NO: 44255 - RNA, 20 nt, Artificial Sequence
  RPE65 RNA guide
uuagaacagcuuauacaggc

SEQ ID NO: 44256 - RNA, 20 nt, Artificial Sequence
  RPE65 RNA guide
uuagauggguuugugucaau

SEQ ID NO: 44257 - RNA, 20 nt, Artificial Sequence
  RPE65 RNA guide
uuagugaaauuucaugugaa

SEQ ID NO: 44258 - RNA, 20 nt, Artificial Sequence
  RPE65 RNA guide
uuagugugcaucagaaucac

SEQ ID NO: 44259 - RNA, 20 nt, Artificial Sequence
  RPE65 RNA guide
uuaugugauucugaugcaca

SEQ ID NO: 44260 - RNA, 20 nt, Artificial Sequence
  RPE65 RNA guide
uucacuaagaagugcaaaug

SEQ ID NO: 44261 - RNA, 20 nt, Artificial Sequence
  RPE65 RNA guide
uucaugugaagcugcaaaau

SEQ ID NO: 44262 - RNA, 20 nt, Artificial Sequence
  RPE65 RNA guide
uucauuuucuccaucauuug

SEQ ID NO: 44263 - RNA, 20 nt, Artificial Sequence
  RPE65 RNA guide
uuccaaagccuuuuaaaacc

SEQ ID NO: 44264 - RNA, 20 nt, Artificial Sequence
  RPE65 RNA guide
uuccaaaucugcugcuauuu

SEQ ID NO: 44265 - RNA, 20 nt, Artificial Sequence
  RPE65 RNA guide
uucccuacuccccugacuua

SEQ ID NO: 44266 - RNA, 20 nt, Artificial Sequence
  RPE65 RNA guide
uuccugggugauuuugcagc

SEQ ID NO: 44267 - RNA, 20 nt, Artificial Sequence
  RPE65 RNA guide
uucuccaucauuugcacuuc

SEQ ID NO: 44268 - RNA, 20 nt, Artificial Sequence
  RPE65 RNA guide
uucugagguuucuucccuac

SEQ ID NO: 44269 - RNA, 20 nt, Artificial Sequence
  RPE65 RNA guide
uucuucccuacuccccugac

SEQ ID NO: 44270 - RNA, 20 nt, Artificial Sequence
  RPE65 RNA guide
uucuuugccuguauaagcug

SEQ ID NO: 44271 - RNA, 20 nt, Artificial Sequence
  RPE65 RNA guide
uugacacaaacccaucuaaa

SEQ ID NO: 44272 - RNA, 20 nt, Artificial Sequence
  RPE65 RNA guide
uugaccauucugagguuucu

SEQ ID NO: 44273 - RNA, 20 nt, Artificial Sequence
  RPE65 RNA guide
uugaggaccauucacuuacu

SEQ ID NO: 44274 - RNA, 20 nt, Artificial Sequence
  RPE65 RNA guide
uugagugcacguuuccaaau

SEQ ID NO: 44275 - RNA, 20 nt, Artificial Sequence
  RPE65 RNA guide
uugcaaaaggcauuuugacc

SEQ ID NO: 44276 - RNA, 20 nt, Artificial Sequence
  RPE65 RNA guide
uugcaacaucuuaagaugcc

SEQ ID NO: 44277 - RNA, 20 nt, Artificial Sequence
  RPE65 RNA guide
uugcaagaugugacuccacu

SEQ ID NO: 44278 - RNA, 20 nt, Artificial Sequence
  RPE65 RNA guide
uugcaauagcuggagguggg

SEQ ID NO: 44279 - RNA, 20 nt, Artificial Sequence
  RPE65 RNA guide
uugcagcuucacaugaaauu

SEQ ID NO: 44280 - RNA, 20 nt, Artificial Sequence
  RPE65 RNA guide
uugccacaacccuauuugag

SEQ ID NO: 44281 - RNA, 20 nt, Artificial Sequence
  RPE65 RNA guide
uugccuguauaagcuguucu

SEQ ID NO: 44282 - RNA, 20 nt, Artificial Sequence
  RPE65 RNA guide
uuggaaacgugcacucaaau

SEQ ID NO: 44283 - RNA, 20 nt, Artificial Sequence
  RPE65 RNA guide
uuggauuuuccugggugauu

SEQ ID NO: 44284 - RNA, 20 nt, Artificial Sequence
  RPE65 RNA guide
uugggcaucuuaagauguug

SEQ ID NO: 44285 - RNA, 20 nt, Artificial Sequence
  RPE65 RNA guide
uuguggcaaguggaguguag

SEQ ID NO: 44286 - RNA, 20 nt, Artificial Sequence
  RPE65 RNA guide
uugugucaauagcccuguac

SEQ ID NO: 44287 - RNA, 20 nt, Artificial Sequence
  RPE65 RNA guide
uuuaagucaggggaguaggg

SEQ ID NO: 44288 - RNA, 20 nt, Artificial Sequence
  RPE65 RNA guide
uuuacucacuaguaagugaa

SEQ ID NO: 44289 - RNA, 20 nt, Artificial Sequence
  RPE65 RNA guide
uuuagaacagcuuauacagg

SEQ ID NO: 44290 - RNA, 20 nt, Artificial Sequence
  RPE65 RNA guide
uuuagauggguuugugucaa

SEQ ID NO: 44291 - RNA, 20 nt, Artificial Sequence
  RPE65 RNA guide
uuuagugugcaucagaauca

SEQ ID NO: 44292 - RNA, 20 nt, Artificial Sequence
  RPE65 RNA guide
uuuaugugauucugaugcac

SEQ ID NO: 44293 - RNA, 20 nt, Artificial Sequence
  RPE65 RNA guide
uuucacuaagaagugcaaau

SEQ ID NO: 44294 - RNA, 20 nt, Artificial Sequence
  RPE65 RNA guide
uuucaugugaagcugcaaaa

SEQ ID NO: 44295 - RNA, 20 nt, Artificial Sequence
  RPE65 RNA guide
uuucauuuucuccaucauuu

SEQ ID NO: 44296 - RNA, 20 nt, Artificial Sequence
  RPE65 RNA guide
uuuccaaaucugcugcuauu

SEQ ID NO: 44297 - RNA, 20 nt, Artificial Sequence
  RPE65 RNA guide
uuuccugggugauuuugcag

SEQ ID NO: 44298 - RNA, 20 nt, Artificial Sequence
  RPE65 RNA guide
uuucuccaucauuugcacuu

SEQ ID NO: 44299 - RNA, 20 nt, Artificial Sequence
  RPE65 RNA guide
uuucuucccuacuccccuga

SEQ ID NO: 44300 - RNA, 20 nt, Artificial Sequence
  RPE65 RNA guide
uuucuuugccuguauaagcu

SEQ ID NO: 44301 - RNA, 20 nt, Artificial Sequence
  RPE65 RNA guide
uuugaccauucugagguuuc

SEQ ID NO: 44302 - RNA, 20 nt, Artificial Sequence
  RPE65 RNA guide
uuugaggaccauucacuuac

SEQ ID NO: 44303 - RNA, 20 nt, Artificial Sequence
  RPE65 RNA guide
uuugagugcacguuuccaaa

SEQ ID NO: 44304 - RNA, 20 nt, Artificial Sequence
  RPE65 RNA guide
uuugcaacaucuuaagaugc

SEQ ID NO: 44305 - RNA, 20 nt, Artificial Sequence
  RPE65 RNA guide
uuugcagcuucacaugaaau

SEQ ID NO: 44306 - RNA, 20 nt, Artificial Sequence
  RPE65 RNA guide
uuugccuguauaagcuguuc

SEQ ID NO: 44307 - RNA, 20 nt, Artificial Sequence
  RPE65 RNA guide
uuuggaaacgugcacucaaa

SEQ ID NO: 44308 - RNA, 20 nt, Artificial Sequence
  RPE65 RNA guide
uuuggauuuuccugggugau

SEQ ID NO: 44309 - RNA, 20 nt, Artificial Sequence
  RPE65 RNA guide
uuugggcaucuuaagauguu

SEQ ID NO: 44310 - RNA, 20 nt, Artificial Sequence
  RPE65 RNA guide
uuugugucaauagcccugua

SEQ ID NO: 44311 - RNA, 20 nt, Artificial Sequence
  RPE65 RNA guide
uuuuaagucaggggaguagg

SEQ ID NO: 44312 - RNA, 20 nt, Artificial Sequence
  RPE65 RNA guide
uuuuccugggugauuuugca

SEQ ID NO: 44313 - RNA, 20 nt, Artificial Sequence
  RPE65 RNA guide
uuuucuccaucauuugcacu

SEQ ID NO: 44314 - RNA, 20 nt, Artificial Sequence
  RPE65 RNA guide
uuuugaccauucugagguuu

SEQ ID NO: 44315 - RNA, 20 nt, Artificial Sequence
  RPE65 RNA guide
uuuugcaacaucuuaagaug

SEQ ID NO: 44316 - RNA, 20 nt, Artificial Sequence
  RPE65 RNA guide
uuuugcagcuucacaugaaa

SEQ ID NO: 44317 - RNA, 21 nt, Artificial Sequence
  RPE65 RNA guide
aaaacccaccuccagcuauug

SEQ ID NO: 44318 - RNA, 21 nt, Artificial Sequence
  RPE65 RNA guide
aaaaggcauuuugaccauucu

SEQ ID NO: 44319 - RNA, 21 nt, Artificial Sequence
  RPE65 RNA guide
aaaaucacccaggaaaaucca

SEQ ID NO: 44320 - RNA, 21 nt, Artificial Sequence
  RPE65 RNA guide
aaaauccaaauagcagcagau

SEQ ID NO: 44321 - RNA, 21 nt, Artificial Sequence
  RPE65 RNA guide
aaaaugccuuuugcaacaucu

SEQ ID NO: 44322 - RNA, 21 nt, Artificial Sequence
  RPE65 RNA guide
aaacccaccuccagcuauugc

SEQ ID NO: 44323 - RNA, 21 nt, Artificial Sequence
  RPE65 RNA guide
aaacccaucuaaacuauaucc

SEQ ID NO: 44324 - RNA, 21 nt, Artificial Sequence
  RPE65 RNA guide
aaaccucagaauggucaaaau

SEQ ID NO: 44325 - RNA, 21 nt, Artificial Sequence
  RPE65 RNA guide
aaacgugcacucaaauagggu

SEQ ID NO: 44326 - RNA, 21 nt, Artificial Sequence
  RPE65 RNA guide
aaacuauauccuuugggcauc

SEQ ID NO: 44327 - RNA, 21 nt, Artificial Sequence
  RPE65 RNA guide
aaacucuuuaugugauucuga

SEQ ID NO: 44328 - RNA, 21 nt, Artificial Sequence
  RPE65 RNA guide
aaagcauuuagaacagcuuau

SEQ ID NO: 44329 - RNA, 21 nt, Artificial Sequence
  RPE65 RNA guide
aaaggauauaguuuagauggg

SEQ ID NO: 44330 - RNA, 21 nt, Artificial Sequence
  RPE65 RNA guide
aaaggcauuuugaccauucug

SEQ ID NO: 44331 - RNA, 21 nt, Artificial Sequence
  RPE65 RNA guide
aaagugguuuuaaaaggcuuu

SEQ ID NO: 44332 - RNA, 21 nt, Artificial Sequence
  RPE65 RNA guide
aaaguuugaggaccauucacu

SEQ ID NO: 44333 - RNA, 21 nt, Artificial Sequence
  RPE65 RNA guide
aaauagcagcagauuuggaaa

SEQ ID NO: 44334 - RNA, 21 nt, Artificial Sequence
  RPE65 RNA guide
aaauaggguuguggcaagugg

SEQ ID NO: 44335 - RNA, 21 nt, Artificial Sequence
  RPE65 RNA guide
aaaucacccaggaaaauccaa

SEQ ID NO: 44336 - RNA, 21 nt, Artificial Sequence
  RPE65 RNA guide
aaauccaaauagcagcagauu

SEQ ID NO: 44337 - RNA, 21 nt, Artificial Sequence
  RPE65 RNA guide
aaaucugcugcuauuuggauu

SEQ ID NO: 44338 - RNA, 21 nt, Artificial Sequence
  RPE65 RNA guide
aaaugccuuuugcaacaucuu

SEQ ID NO: 44339 - RNA, 21 nt, Artificial Sequence
  RPE65 RNA guide
aaauguguuucuuugccugua

SEQ ID NO: 44340 - RNA, 21 nt, Artificial Sequence
  RPE65 RNA guide
aaauuucaugugaagcugcaa

SEQ ID NO: 44341 - RNA, 21 nt, Artificial Sequence
  RPE65 RNA guide
aacaaucaaaauguguuucuu

SEQ ID NO: 44342 - RNA, 21 nt, Artificial Sequence
  RPE65 RNA guide
aacacauuuugauuguuuuag

SEQ ID NO: 44343 - RNA, 21 nt, Artificial Sequence
  RPE65 RNA guide
aacagcuuauacaggcaaaga

SEQ ID NO: 44344 - RNA, 21 nt, Artificial Sequence
  RPE65 RNA guide
aacaucuuaagaugcccaaag

SEQ ID NO: 44345 - RNA, 21 nt, Artificial Sequence
  RPE65 RNA guide
aacccaccuccagcuauugca

SEQ ID NO: 44346 - RNA, 21 nt, Artificial Sequence
  RPE65 RNA guide
aacccaucuaaacuauauccu

SEQ ID NO: 44347 - RNA, 21 nt, Artificial Sequence
  RPE65 RNA guide
aaccccucuaaaacaaucaaa

SEQ ID NO: 44348 - RNA, 21 nt, Artificial Sequence
  RPE65 RNA guide
aacccuauuugagugcacguu

SEQ ID NO: 44349 - RNA, 21 nt, Artificial Sequence
  RPE65 RNA guide
aaccucagaauggucaaaaug

SEQ ID NO: 44350 - RNA, 21 nt, Artificial Sequence
  RPE65 RNA guide
aacgugcacucaaauaggguu

SEQ ID NO: 44351 - RNA, 21 nt, Artificial Sequence
  RPE65 RNA guide
aacuauauccuuugggcaucu

SEQ ID NO: 44352 - RNA, 21 nt, Artificial Sequence
  RPE65 RNA guide
aacucuuuaugugauucugau

SEQ ID NO: 44353 - RNA, 21 nt, Artificial Sequence
  RPE65 RNA guide
aacuuuagugugcaucagaau

SEQ ID NO: 44354 - RNA, 21 nt, Artificial Sequence
  RPE65 RNA guide
aagaaaccucagaauggucaa

SEQ ID NO: 44355 - RNA, 21 nt, Artificial Sequence
  RPE65 RNA guide
aagaagugcaaaugauggaga

SEQ ID NO: 44356 - RNA, 21 nt, Artificial Sequence
  RPE65 RNA guide
aagaauuacuguacagggcua

SEQ ID NO: 44357 - RNA, 21 nt, Artificial Sequence
  RPE65 RNA guide
aagaugcccaaaggauauagu

SEQ ID NO: 44358 - RNA, 21 nt, Artificial Sequence
  RPE65 RNA guide
aagaugugacuccacuacacu

SEQ ID NO: 44359 - RNA, 21 nt, Artificial Sequence
  RPE65 RNA guide
aagauguugcaaaaggcauuu

SEQ ID NO: 44360 - RNA, 21 nt, Artificial Sequence
  RPE65 RNA guide
aagcauuuagaacagcuuaua

SEQ ID NO: 44361 - RNA, 21 nt, Artificial Sequence
  RPE65 RNA guide
aagcugcaaaaucacccagga

SEQ ID NO: 44362 - RNA, 21 nt, Artificial Sequence
  RPE65 RNA guide
aaggauauaguuuagaugggu

SEQ ID NO: 44363 - RNA, 21 nt, Artificial Sequence
  RPE65 RNA guide
aaggcauuuugaccauucuga

SEQ ID NO: 44364 - RNA, 21 nt, Artificial Sequence
  RPE65 RNA guide
aagucaggggaguagggaaga

SEQ ID NO: 44365 - RNA, 21 nt, Artificial Sequence
  RPE65 RNA guide
aagugaaugguccucaaacuu

SEQ ID NO: 44366 - RNA, 21 nt, Artificial Sequence
  RPE65 RNA guide
aagugcaaaugauggagaaaa

SEQ ID NO: 44367 - RNA, 21 nt, Artificial Sequence
  RPE65 RNA guide
aaguggaguguaguggaguca

SEQ ID NO: 44368 - RNA, 21 nt, Artificial Sequence
  RPE65 RNA guide
aaguuugaggaccauucacuu

SEQ ID NO: 44369 - RNA, 21 nt, Artificial Sequence
  RPE65 RNA guide
aauagcagcagauuuggaaac

SEQ ID NO: 44370 - RNA, 21 nt, Artificial Sequence
  RPE65 RNA guide
aauagcccuguacaguaauuc

SEQ ID NO: 44371 - RNA, 21 nt, Artificial Sequence
  RPE65 RNA guide
aauagcuggagguggguuuua

SEQ ID NO: 44372 - RNA, 21 nt, Artificial Sequence
  RPE65 RNA guide
aauaggguuguggcaagugga

SEQ ID NO: 44373 - RNA, 21 nt, Artificial Sequence
  RPE65 RNA guide
aaucaaaauguguuucuuugc

SEQ ID NO: 44374 - RNA, 21 nt, Artificial Sequence
  RPE65 RNA guide
aaucacccaggaaaauccaaa

SEQ ID NO: 44375 - RNA, 21 nt, Artificial Sequence
  RPE65 RNA guide
aauccaaauagcagcagauuu

SEQ ID NO: 44376 - RNA, 21 nt, Artificial Sequence
  RPE65 RNA guide
aaucugcugcuauuuggauuu

SEQ ID NO: 44377 - RNA, 21 nt, Artificial Sequence
  RPE65 RNA guide
aaugccuuuugcaacaucuua

SEQ ID NO: 44378 - RNA, 21 nt, Artificial Sequence
  RPE65 RNA guide
aauggucaaaaugccuuuugc

SEQ ID NO: 44379 - RNA, 21 nt, Artificial Sequence
  RPE65 RNA guide
aaugguccucaaacuuuagug

SEQ ID NO: 44380 - RNA, 21 nt, Artificial Sequence
  RPE65 RNA guide
aaugugcauaagaauuacugu

SEQ ID NO: 44381 - RNA, 21 nt, Artificial Sequence
  RPE65 RNA guide
aauguguuucuuugccuguau

SEQ ID NO: 44382 - RNA, 21 nt, Artificial Sequence
  RPE65 RNA guide
aauuacuguacagggcuauug

SEQ ID NO: 44383 - RNA, 21 nt, Artificial Sequence
  RPE65 RNA guide
aauuuacucacuaguaaguga

SEQ ID NO: 44384 - RNA, 21 nt, Artificial Sequence
  RPE65 RNA guide
aauuucaugugaagcugcaaa

SEQ ID NO: 44385 - RNA, 21 nt, Artificial Sequence
  RPE65 RNA guide
acaaacccaucuaaacuauau

SEQ ID NO: 44386 - RNA, 21 nt, Artificial Sequence
  RPE65 RNA guide
acaaagcauuuagaacagcuu

SEQ ID NO: 44387 - RNA, 21 nt, Artificial Sequence
  RPE65 RNA guide
acaacccuauuugagugcacg

SEQ ID NO: 44388 - RNA, 21 nt, Artificial Sequence
  RPE65 RNA guide
acaaucaaaauguguuucuuu

SEQ ID NO: 44389 - RNA, 21 nt, Artificial Sequence
  RPE65 RNA guide
acacaaacccaucuaaacuau

SEQ ID NO: 44390 - RNA, 21 nt, Artificial Sequence
  RPE65 RNA guide
acacauuuugauuguuuuaga

SEQ ID NO: 44391 - RNA, 21 nt, Artificial Sequence
  RPE65 RNA guide
acacuaaaguuugaggaccau

SEQ ID NO: 44392 - RNA, 21 nt, Artificial Sequence
  RPE65 RNA guide
acacuccacuugccacaaccc

SEQ ID NO: 44393 - RNA, 21 nt, Artificial Sequence
  RPE65 RNA guide
acagcuuauacaggcaaagaa

SEQ ID NO: 44394 - RNA, 21 nt, Artificial Sequence
  RPE65 RNA guide
acaggcaaagaaacacauuuu

SEQ ID NO: 44395 - RNA, 21 nt, Artificial Sequence
  RPE65 RNA guide
acagggcuauugacacaaacc

SEQ ID NO: 44396 - RNA, 21 nt, Artificial Sequence
  RPE65 RNA guide
acaucuuaagaugcccaaagg

SEQ ID NO: 44397 - RNA, 21 nt, Artificial Sequence
  RPE65 RNA guide
acaucuugcaauagcuggagg

SEQ ID NO: 44398 - RNA, 21 nt, Artificial Sequence
  RPE65 RNA guide
acaugaaauuucacuaagaag

SEQ ID NO: 44399 - RNA, 21 nt, Artificial Sequence
  RPE65 RNA guide
acauuuugauuguuuuagagg

SEQ ID NO: 44400 - RNA, 21 nt, Artificial Sequence
  RPE65 RNA guide
accauucacuuacuagugagu

SEQ ID NO: 44401 - RNA, 21 nt, Artificial Sequence
  RPE65 RNA guide
accauucugagguuucuuccc

SEQ ID NO: 44402 - RNA, 21 nt, Artificial Sequence
  RPE65 RNA guide
acccaccuccagcuauugcaa

SEQ ID NO: 44403 - RNA, 21 nt, Artificial Sequence
  RPE65 RNA guide
acccaggaaaauccaaauagc

SEQ ID NO: 44404 - RNA, 21 nt, Artificial Sequence
  RPE65 RNA guide
acccaucuaaacuauauccuu

SEQ ID NO: 44405 - RNA, 21 nt, Artificial Sequence
  RPE65 RNA guide
accccucuaaaacaaucaaaa

SEQ ID NO: 44406 - RNA, 21 nt, Artificial Sequence
  RPE65 RNA guide
acccuauuugagugcacguuu

SEQ ID NO: 44407 - RNA, 21 nt, Artificial Sequence
  RPE65 RNA guide
accucagaauggucaaaaugc

SEQ ID NO: 44408 - RNA, 21 nt, Artificial Sequence
  RPE65 RNA guide
accuccagcuauugcaagaug

SEQ ID NO: 44409 - RNA, 21 nt, Artificial Sequence
  RPE65 RNA guide
acgugcacucaaauaggguug

SEQ ID NO: 44410 - RNA, 21 nt, Artificial Sequence
  RPE65 RNA guide
acguuuccaaaucugcugcua

SEQ ID NO: 44411 - RNA, 21 nt, Artificial Sequence
  RPE65 RNA guide
acuaaaguuugaggaccauuc

SEQ ID NO: 44412 - RNA, 21 nt, Artificial Sequence
  RPE65 RNA guide
acuaagaagugcaaaugaugg

SEQ ID NO: 44413 - RNA, 21 nt, Artificial Sequence
  RPE65 RNA guide
acuacacuccacuugccacaa

SEQ ID NO: 44414 - RNA, 21 nt, Artificial Sequence
  RPE65 RNA guide
acuaguaagugaaugguccuc

SEQ ID NO: 44415 - RNA, 21 nt, Artificial Sequence
  RPE65 RNA guide
acuauauccuuugggcaucuu

SEQ ID NO: 44416 - RNA, 21 nt, Artificial Sequence
  RPE65 RNA guide
acucaaauaggguuguggcaa

SEQ ID NO: 44417 - RNA, 21 nt, Artificial Sequence
  RPE65 RNA guide
acucacuaguaagugaauggu

SEQ ID NO: 44418 - RNA, 21 nt, Artificial Sequence
  RPE65 RNA guide
acuccacuacacuccacuugc

SEQ ID NO: 44419 - RNA, 21 nt, Artificial Sequence
  RPE65 RNA guide
acuccacuugccacaacccua

SEQ ID NO: 44420 - RNA, 21 nt, Artificial Sequence
  RPE65 RNA guide
acuccccugacuuaaaaccca

SEQ ID NO: 44421 - RNA, 21 nt, Artificial Sequence
  RPE65 RNA guide
acucuuuaugugauucugaug

SEQ ID NO: 44422 - RNA, 21 nt, Artificial Sequence
  RPE65 RNA guide
acuguacagggcuauugacac

SEQ ID NO: 44423 - RNA, 21 nt, Artificial Sequence
  RPE65 RNA guide
acuuaaaacccaccuccagcu

SEQ ID NO: 44424 - RNA, 21 nt, Artificial Sequence
  RPE65 RNA guide
acuugccacaacccuauuuga

SEQ ID NO: 44425 - RNA, 21 nt, Artificial Sequence
  RPE65 RNA guide
acuuuagugugcaucagaauc

SEQ ID NO: 44426 - RNA, 21 nt, Artificial Sequence
  RPE65 RNA guide
agaaaccucagaauggucaaa

SEQ ID NO: 44427 - RNA, 21 nt, Artificial Sequence
  RPE65 RNA guide
agaaacucuuuaugugauucu

SEQ ID NO: 44428 - RNA, 21 nt, Artificial Sequence
  RPE65 RNA guide
agaacagcuuauacaggcaaa

SEQ ID NO: 44429 - RNA, 21 nt, Artificial Sequence
  RPE65 RNA guide
agaagugcaaaugauggagaa

SEQ ID NO: 44430 - RNA, 21 nt, Artificial Sequence
  RPE65 RNA guide
agaauggucaaaaugccuuuu

SEQ ID NO: 44431 - RNA, 21 nt, Artificial Sequence
  RPE65 RNA guide
agaauuacuguacagggcuau

SEQ ID NO: 44432 - RNA, 21 nt, Artificial Sequence
  RPE65 RNA guide
agagggguuauuuucauuuuc

SEQ ID NO: 44433 - RNA, 21 nt, Artificial Sequence
  RPE65 RNA guide
agaugcccaaaggauauaguu

SEQ ID NO: 44434 - RNA, 21 nt, Artificial Sequence
  RPE65 RNA guide
agauggguuugugucaauagc

SEQ ID NO: 44435 - RNA, 21 nt, Artificial Sequence
  RPE65 RNA guide
agaugugacuccacuacacuc

SEQ ID NO: 44436 - RNA, 21 nt, Artificial Sequence
  RPE65 RNA guide
agauguugcaaaaggcauuuu

SEQ ID NO: 44437 - RNA, 21 nt, Artificial Sequence
  RPE65 RNA guide
agauuuggaaacgugcacuca

SEQ ID NO: 44438 - RNA, 21 nt, Artificial Sequence
  RPE65 RNA guide
agcagauuuggaaacgugcac

SEQ ID NO: 44439 - RNA, 21 nt, Artificial Sequence
  RPE65 RNA guide
agcagcagauuuggaaacgug

SEQ ID NO: 44440 - RNA, 21 nt, Artificial Sequence
  RPE65 RNA guide
agcauuuagaacagcuuauac

SEQ ID NO: 44441 - RNA, 21 nt, Artificial Sequence
  RPE65 RNA guide
agcccuguacaguaauucuua

SEQ ID NO: 44442 - RNA, 21 nt, Artificial Sequence
  RPE65 RNA guide
agcuauugcaagaugugacuc

SEQ ID NO: 44443 - RNA, 21 nt, Artificial Sequence
  RPE65 RNA guide
agcugcaaaaucacccaggaa

SEQ ID NO: 44444 - RNA, 21 nt, Artificial Sequence
  RPE65 RNA guide
agcuggagguggguuuuaagu

SEQ ID NO: 44445 - RNA, 21 nt, Artificial Sequence
  RPE65 RNA guide
agcuuauacaggcaaagaaac

SEQ ID NO: 44446 - RNA, 21 nt, Artificial Sequence
  RPE65 RNA guide
agcuucacaugaaauuucacu

SEQ ID NO: 44447 - RNA, 21 nt, Artificial Sequence
  RPE65 RNA guide
aggaaaauccaaauagcagca

SEQ ID NO: 44448 - RNA, 21 nt, Artificial Sequence
  RPE65 RNA guide
aggaccauucacuuacuagug

SEQ ID NO: 44449 - RNA, 21 nt, Artificial Sequence
  RPE65 RNA guide
aggauauaguuuagauggguu

SEQ ID NO: 44450 - RNA, 21 nt, Artificial Sequence
  RPE65 RNA guide
aggcaaagaaacacauuuuga

SEQ ID NO: 44451 - RNA, 21 nt, Artificial Sequence
  RPE65 RNA guide
aggcauuuugaccauucugag

SEQ ID NO: 44452 - RNA, 21 nt, Artificial Sequence
  RPE65 RNA guide
agggaagaaaccucagaaugg

SEQ ID NO: 44453 - RNA, 21 nt, Artificial Sequence
  RPE65 RNA guide
agggcuauugacacaaaccca

SEQ ID NO: 44454 - RNA, 21 nt, Artificial Sequence
  RPE65 RNA guide
aggggaguagggaagaaaccu

SEQ ID NO: 44455 - RNA, 21 nt, Artificial Sequence
  RPE65 RNA guide
agggguuauuuucauuuucuc

SEQ ID NO: 44456 - RNA, 21 nt, Artificial Sequence
  RPE65 RNA guide
aggguuguggcaaguggagug

SEQ ID NO: 44457 - RNA, 21 nt, Artificial Sequence
  RPE65 RNA guide
agguggguuuuaagucagggg

SEQ ID NO: 44458 - RNA, 21 nt, Artificial Sequence
  RPE65 RNA guide
agguuucuucccuacuccccu

SEQ ID NO: 44459 - RNA, 21 nt, Artificial Sequence
  RPE65 RNA guide
aguaagugaaugguccucaaa

SEQ ID NO: 44460 - RNA, 21 nt, Artificial Sequence
  RPE65 RNA guide
aguagggaagaaaccucagaa

SEQ ID NO: 44461 - RNA, 21 nt, Artificial Sequence
  RPE65 RNA guide
agucacaucuugcaauagcug

SEQ ID NO: 44462 - RNA, 21 nt, Artificial Sequence
  RPE65 RNA guide
agucaggggaguagggaagaa

SEQ ID NO: 44463 - RNA, 21 nt, Artificial Sequence
  RPE65 RNA guide
agugaaauuucaugugaagcu

SEQ ID NO: 44464 - RNA, 21 nt, Artificial Sequence
  RPE65 RNA guide
agugaaugguccucaaacuuu

SEQ ID NO: 44465 - RNA, 21 nt, Artificial Sequence
  RPE65 RNA guide
agugcaaaugauggagaaaau

SEQ ID NO: 44466 - RNA, 21 nt, Artificial Sequence
  RPE65 RNA guide
agugcacguuuccaaaucugc

SEQ ID NO: 44467 - RNA, 21 nt, Artificial Sequence
  RPE65 RNA guide
aguggagucacaucuugcaau

SEQ ID NO: 44468 - RNA, 21 nt, Artificial Sequence
  RPE65 RNA guide
aguggaguguaguggagucac

SEQ ID NO: 44469 - RNA, 21 nt, Artificial Sequence
  RPE65 RNA guide
aguguaguggagucacaucuu

SEQ ID NO: 44470 - RNA, 21 nt, Artificial Sequence
  RPE65 RNA guide
agugugcaucagaaucacaua

SEQ ID NO: 44471 - RNA, 21 nt, Artificial Sequence
  RPE65 RNA guide
aguuuagauggguuuguguca

SEQ ID NO: 44472 - RNA, 21 nt, Artificial Sequence
  RPE65 RNA guide
aguuugaggaccauucacuua

SEQ ID NO: 44473 - RNA, 21 nt, Artificial Sequence
  RPE65 RNA guide
auaaagugguuuuaaaaggcu

SEQ ID NO: 44474 - RNA, 21 nt, Artificial Sequence
  RPE65 RNA guide
auaagaauuacuguacagggc

SEQ ID NO: 44475 - RNA, 21 nt, Artificial Sequence
  RPE65 RNA guide
auacaggcaaagaaacacauu

SEQ ID NO: 44476 - RNA, 21 nt, Artificial Sequence
  RPE65 RNA guide
auagcagcagauuuggaaacg

SEQ ID NO: 44477 - RNA, 21 nt, Artificial Sequence
  RPE65 RNA guide
auagcccuguacaguaauucu

SEQ ID NO: 44478 - RNA, 21 nt, Artificial Sequence
  RPE65 RNA guide
auagcuggagguggguuuuaa

SEQ ID NO: 44479 - RNA, 21 nt, Artificial Sequence
  RPE65 RNA guide
auaggguuguggcaaguggag

SEQ ID NO: 44480 - RNA, 21 nt, Artificial Sequence
  RPE65 RNA guide
auaguuuagauggguuugugu

SEQ ID NO: 44481 - RNA, 21 nt, Artificial Sequence
  RPE65 RNA guide
auauaguuuagauggguuugu

SEQ ID NO: 44482 - RNA, 21 nt, Artificial Sequence
  RPE65 RNA guide
auauccuuugggcaucuuaag

SEQ ID NO: 44483 - RNA, 21 nt, Artificial Sequence
  RPE65 RNA guide
aucaaaauguguuucuuugcc

SEQ ID NO: 44484 - RNA, 21 nt, Artificial Sequence
  RPE65 RNA guide
aucacccaggaaaauccaaau

SEQ ID NO: 44485 - RNA, 21 nt, Artificial Sequence
  RPE65 RNA guide
auccaaauagcagcagauuug

SEQ ID NO: 44486 - RNA, 21 nt, Artificial Sequence
  RPE65 RNA guide
auccuuugggcaucuuaagau

SEQ ID NO: 44487 - RNA, 21 nt, Artificial Sequence
  RPE65 RNA guide
aucuaaacuauauccuuuggg

SEQ ID NO: 44488 - RNA, 21 nt, Artificial Sequence
  RPE65 RNA guide
aucugcugcuauuuggauuuu

SEQ ID NO: 44489 - RNA, 21 nt, Artificial Sequence
  RPE65 RNA guide
aucuuaagaugcccaaaggau

SEQ ID NO: 44490 - RNA, 21 nt, Artificial Sequence
  RPE65 RNA guide
aucuuaagauguugcaaaagg

SEQ ID NO: 44491 - RNA, 21 nt, Artificial Sequence
  RPE65 RNA guide
aucuugcaauagcuggaggug

SEQ ID NO: 44492 - RNA, 21 nt, Artificial Sequence
  RPE65 RNA guide
augauggagaaaaugaaaaua

SEQ ID NO: 44493 - RNA, 21 nt, Artificial Sequence
  RPE65 RNA guide
augcacacuaaaguuugagga

SEQ ID NO: 44494 - RNA, 21 nt, Artificial Sequence
  RPE65 RNA guide
augcccaaaggauauaguuua

SEQ ID NO: 44495 - RNA, 21 nt, Artificial Sequence
  RPE65 RNA guide
augccuuuugcaacaucuuaa

SEQ ID NO: 44496 - RNA, 21 nt, Artificial Sequence
  RPE65 RNA guide
auggagaaaaugaaaauaacc

SEQ ID NO: 44497 - RNA, 21 nt, Artificial Sequence
  RPE65 RNA guide
auggguuugugucaauagccc

SEQ ID NO: 44498 - RNA, 21 nt, Artificial Sequence
  RPE65 RNA guide
auggucaaaaugccuuuugca

SEQ ID NO: 44499 - RNA, 21 nt, Artificial Sequence
  RPE65 RNA guide
augguccucaaacuuuagugu

SEQ ID NO: 44500 - RNA, 21 nt, Artificial Sequence
  RPE65 RNA guide
augugaagcugcaaaaucacc

SEQ ID NO: 44501 - RNA, 21 nt, Artificial Sequence
  RPE65 RNA guide
augugacuccacuacacucca

SEQ ID NO: 44502 - RNA, 21 nt, Artificial Sequence
  RPE65 RNA guide
augugauucugaugcacacua

SEQ ID NO: 44503 - RNA, 21 nt, Artificial Sequence
  RPE65 RNA guide
augugcauaagaauuacugua

SEQ ID NO: 44504 - RNA, 21 nt, Artificial Sequence
  RPE65 RNA guide
auguguuucuuugccuguaua

SEQ ID NO: 44505 - RNA, 21 nt, Artificial Sequence
  RPE65 RNA guide
auguugcaaaaggcauuuuga

SEQ ID NO: 44506 - RNA, 21 nt, Artificial Sequence
  RPE65 RNA guide
auuacuguacagggcuauuga

SEQ ID NO: 44507 - RNA, 21 nt, Artificial Sequence
  RPE65 RNA guide
auucugagguuucuucccuac

SEQ ID NO: 44508 - RNA, 21 nt, Artificial Sequence
  RPE65 RNA guide
auugacacaaacccaucuaaa

SEQ ID NO: 44509 - RNA, 21 nt, Artificial Sequence
  RPE65 RNA guide
auugcaagaugugacuccacu

SEQ ID NO: 44510 - RNA, 21 nt, Artificial Sequence
  RPE65 RNA guide
auuuacucacuaguaagugaa

SEQ ID NO: 44511 - RNA, 21 nt, Artificial Sequence
  RPE65 RNA guide
auuuagaacagcuuauacagg

SEQ ID NO: 44512 - RNA, 21 nt, Artificial Sequence
  RPE65 RNA guide
auuucacuaagaagugcaaau

SEQ ID NO: 44513 - RNA, 21 nt, Artificial Sequence
  RPE65 RNA guide
auuucaugugaagcugcaaaa

SEQ ID NO: 44514 - RNA, 21 nt, Artificial Sequence
  RPE65 RNA guide
auuugagugcacguuuccaaa

SEQ ID NO: 44515 - RNA, 21 nt, Artificial Sequence
  RPE65 RNA guide
auuuggaaacgugcacucaaa

SEQ ID NO: 44516 - RNA, 21 nt, Artificial Sequence
  RPE65 RNA guide
auuuggauuuuccugggugau

SEQ ID NO: 44517 - RNA, 21 nt, Artificial Sequence
  RPE65 RNA guide
auuuuccugggugauuuugca

SEQ ID NO: 44518 - RNA, 21 nt, Artificial Sequence
  RPE65 RNA guide
auuuucuccaucauuugcacu

SEQ ID NO: 44519 - RNA, 21 nt, Artificial Sequence
  RPE65 RNA guide
auuuugaccauucugagguuu

SEQ ID NO: 44520 - RNA, 21 nt, Artificial Sequence
  RPE65 RNA guide
auuuugcagcuucacaugaaa

SEQ ID NO: 44521 - RNA, 21 nt, Artificial Sequence
  RPE65 RNA guide
caaaaggcauuuugaccauuc

SEQ ID NO: 44522 - RNA, 21 nt, Artificial Sequence
  RPE65 RNA guide
caaaaucacccaggaaaaucc

SEQ ID NO: 44523 - RNA, 21 nt, Artificial Sequence
  RPE65 RNA guide
caaaaugccuuuugcaacauc

SEQ ID NO: 44524 - RNA, 21 nt, Artificial Sequence
  RPE65 RNA guide
caaaauguguuucuuugccug

SEQ ID NO: 44525 - RNA, 21 nt, Artificial Sequence
  RPE65 RNA guide
caaacccaucuaaacuauauc

SEQ ID NO: 44526 - RNA, 21 nt, Artificial Sequence
  RPE65 RNA guide
caaagcauuuagaacagcuua

SEQ ID NO: 44527 - RNA, 21 nt, Artificial Sequence
  RPE65 RNA guide
caaaggauauaguuuagaugg

SEQ ID NO: 44528 - RNA, 21 nt, Artificial Sequence
  RPE65 RNA guide
caaauagcagcagauuuggaa

SEQ ID NO: 44529 - RNA, 21 nt, Artificial Sequence
  RPE65 RNA guide
caaauaggguuguggcaagug

SEQ ID NO: 44530 - RNA, 21 nt, Artificial Sequence
  RPE65 RNA guide
caaaucugcugcuauuuggau

SEQ ID NO: 44531 - RNA, 21 nt, Artificial Sequence
  RPE65 RNA guide
caacaucuuaagaugcccaaa

SEQ ID NO: 44532 - RNA, 21 nt, Artificial Sequence
  RPE65 RNA guide
caacccuauuugagugcacgu

SEQ ID NO: 44533 - RNA, 21 nt, Artificial Sequence
  RPE65 RNA guide
caagaugugacuccacuacac

SEQ ID NO: 44534 - RNA, 21 nt, Artificial Sequence
  RPE65 RNA guide
caaguggaguguaguggaguc

SEQ ID NO: 44535 - RNA, 21 nt, Artificial Sequence
  RPE65 RNA guide
caauagcccuguacaguaauu

SEQ ID NO: 44536 - RNA, 21 nt, Artificial Sequence
  RPE65 RNA guide
caauagcuggagguggguuuu

SEQ ID NO: 44537 - RNA, 21 nt, Artificial Sequence
  RPE65 RNA guide
caaucaaaauguguuucuuug

SEQ ID NO: 44538 - RNA, 21 nt, Artificial Sequence
  RPE65 RNA guide
cacaaacccaucuaaacuaua

SEQ ID NO: 44539 - RNA, 21 nt, Artificial Sequence
  RPE65 RNA guide
cacaacccuauuugagugcac

SEQ ID NO: 44540 - RNA, 21 nt, Artificial Sequence
  RPE65 RNA guide
cacacuaaaguuugaggacca

SEQ ID NO: 44541 - RNA, 21 nt, Artificial Sequence
  RPE65 RNA guide
cacaucuugcaauagcuggag

SEQ ID NO: 44542 - RNA, 21 nt, Artificial Sequence
  RPE65 RNA guide
cacaugaaauuucacuaagaa

SEQ ID NO: 44543 - RNA, 21 nt, Artificial Sequence
  RPE65 RNA guide
cacauuuugauuguuuuagag

SEQ ID NO: 44544 - RNA, 21 nt, Artificial Sequence
  RPE65 RNA guide
cacccaggaaaauccaaauag

SEQ ID NO: 44545 - RNA, 21 nt, Artificial Sequence
  RPE65 RNA guide
caccuccagcuauugcaagau

SEQ ID NO: 44546 - RNA, 21 nt, Artificial Sequence
  RPE65 RNA guide
cacguuuccaaaucugcugcu

SEQ ID NO: 44547 - RNA, 21 nt, Artificial Sequence
  RPE65 RNA guide
cacuaaaguuugaggaccauu

SEQ ID NO: 44548 - RNA, 21 nt, Artificial Sequence
  RPE65 RNA guide
cacuaagaagugcaaaugaug

SEQ ID NO: 44549 - RNA, 21 nt, Artificial Sequence
  RPE65 RNA guide
cacuacacuccacuugccaca

SEQ ID NO: 44550 - RNA, 21 nt, Artificial Sequence
  RPE65 RNA guide
cacuaguaagugaaugguccu

SEQ ID NO: 44551 - RNA, 21 nt, Artificial Sequence
  RPE65 RNA guide
cacucaaauaggguuguggca

SEQ ID NO: 44552 - RNA, 21 nt, Artificial Sequence
  RPE65 RNA guide
cacuccacuugccacaacccu

SEQ ID NO: 44553 - RNA, 21 nt, Artificial Sequence
  RPE65 RNA guide
cacuucuuagugaaauuucau

SEQ ID NO: 44554 - RNA, 21 nt, Artificial Sequence
  RPE65 RNA guide
cacuugccacaacccuauuug

SEQ ID NO: 44555 - RNA, 21 nt, Artificial Sequence
  RPE65 RNA guide
cagaauggucaaaaugccuuu

SEQ ID NO: 44556 - RNA, 21 nt, Artificial Sequence
  RPE65 RNA guide
cagauuuggaaacgugcacuc

SEQ ID NO: 44557 - RNA, 21 nt, Artificial Sequence
  RPE65 RNA guide
cagcagauuuggaaacgugca

SEQ ID NO: 44558 - RNA, 21 nt, Artificial Sequence
  RPE65 RNA guide
cagcuauugcaagaugugacu

SEQ ID NO: 44559 - RNA, 21 nt, Artificial Sequence
  RPE65 RNA guide
cagcuuauacaggcaaagaaa

SEQ ID NO: 44560 - RNA, 21 nt, Artificial Sequence
  RPE65 RNA guide
cagcuucacaugaaauuucac

SEQ ID NO: 44561 - RNA, 21 nt, Artificial Sequence
  RPE65 RNA guide
caggaaaauccaaauagcagc

SEQ ID NO: 44562 - RNA, 21 nt, Artificial Sequence
  RPE65 RNA guide
caggcaaagaaacacauuuug

SEQ ID NO: 44563 - RNA, 21 nt, Artificial Sequence
  RPE65 RNA guide
cagggcuauugacacaaaccc

SEQ ID NO: 44564 - RNA, 21 nt, Artificial Sequence
  RPE65 RNA guide
caggggaguagggaagaaacc

SEQ ID NO: 44565 - RNA, 21 nt, Artificial Sequence
  RPE65 RNA guide
cauaagaauuacuguacaggg

SEQ ID NO: 44566 - RNA, 21 nt, Artificial Sequence
  RPE65 RNA guide
caucagaaucacauaaagagu

SEQ ID NO: 44567 - RNA, 21 nt, Artificial Sequence
  RPE65 RNA guide
caucauuugcacuucuuagug

SEQ ID NO: 44568 - RNA, 21 nt, Artificial Sequence
  RPE65 RNA guide
caucuaaacuauauccuuugg

SEQ ID NO: 44569 - RNA, 21 nt, Artificial Sequence
  RPE65 RNA guide
caucuuaagaugcccaaagga

SEQ ID NO: 44570 - RNA, 21 nt, Artificial Sequence
  RPE65 RNA guide
caucuuaagauguugcaaaag

SEQ ID NO: 44571 - RNA, 21 nt, Artificial Sequence
  RPE65 RNA guide
caucuugcaauagcuggaggu

SEQ ID NO: 44572 - RNA, 21 nt, Artificial Sequence
  RPE65 RNA guide
caugaaauuucacuaagaagu

SEQ ID NO: 44573 - RNA, 21 nt, Artificial Sequence
  RPE65 RNA guide
caugugaagcugcaaaaucac

SEQ ID NO: 44574 - RNA, 21 nt, Artificial Sequence
  RPE65 RNA guide
cauucugagguuucuucccua

SEQ ID NO: 44575 - RNA, 21 nt, Artificial Sequence
  RPE65 RNA guide
cauuuagaacagcuuauacag

SEQ ID NO: 44576 - RNA, 21 nt, Artificial Sequence
  RPE65 RNA guide
cauuugcacuucuuagugaaa

SEQ ID NO: 44577 - RNA, 21 nt, Artificial Sequence
  RPE65 RNA guide
cauuuucuccaucauuugcac

SEQ ID NO: 44578 - RNA, 21 nt, Artificial Sequence
  RPE65 RNA guide
cauuuugaccauucugagguu

SEQ ID NO: 44579 - RNA, 21 nt, Artificial Sequence
  RPE65 RNA guide
cauuuugauuguuuuagaggg

SEQ ID NO: 44580 - RNA, 21 nt, Artificial Sequence
  RPE65 RNA guide
ccaaagccuuuuaaaaccacu

SEQ ID NO: 44581 - RNA, 21 nt, Artificial Sequence
  RPE65 RNA guide
ccaaaggauauaguuuagaug

SEQ ID NO: 44582 - RNA, 21 nt, Artificial Sequence
  RPE65 RNA guide
ccaaauagcagcagauuugga

SEQ ID NO: 44583 - RNA, 21 nt, Artificial Sequence
  RPE65 RNA guide
ccaaaucugcugcuauuugga

SEQ ID NO: 44584 - RNA, 21 nt, Artificial Sequence
  RPE65 RNA guide
ccacaacccuauuugagugca

SEQ ID NO: 44585 - RNA, 21 nt, Artificial Sequence
  RPE65 RNA guide
ccaccuccagcuauugcaaga

SEQ ID NO: 44586 - RNA, 21 nt, Artificial Sequence
  RPE65 RNA guide
ccacuacacuccacuugccac

SEQ ID NO: 44587 - RNA, 21 nt, Artificial Sequence
  RPE65 RNA guide
ccacuugccacaacccuauuu

SEQ ID NO: 44588 - RNA, 21 nt, Artificial Sequence
  RPE65 RNA guide
ccagcuauugcaagaugugac

SEQ ID NO: 44589 - RNA, 21 nt, Artificial Sequence
  RPE65 RNA guide
ccaggaaaauccaaauagcag

SEQ ID NO: 44590 - RNA, 21 nt, Artificial Sequence
  RPE65 RNA guide
ccaucauuugcacuucuuagu

SEQ ID NO: 44591 - RNA, 21 nt, Artificial Sequence
  RPE65 RNA guide
ccaucuaaacuauauccuuug

SEQ ID NO: 44592 - RNA, 21 nt, Artificial Sequence
  RPE65 RNA guide
ccauucacuuacuagugagua

SEQ ID NO: 44593 - RNA, 21 nt, Artificial Sequence
  RPE65 RNA guide
ccauucugagguuucuucccu

SEQ ID NO: 44594 - RNA, 21 nt, Artificial Sequence
  RPE65 RNA guide
cccaaaggauauaguuuagau

SEQ ID NO: 44595 - RNA, 21 nt, Artificial Sequence
  RPE65 RNA guide
cccaccuccagcuauugcaag

SEQ ID NO: 44596 - RNA, 21 nt, Artificial Sequence
  RPE65 RNA guide
cccaggaaaauccaaauagca

SEQ ID NO: 44597 - RNA, 21 nt, Artificial Sequence
  RPE65 RNA guide
cccaucuaaacuauauccuuu

SEQ ID NO: 44598 - RNA, 21 nt, Artificial Sequence
  RPE65 RNA guide
ccccucuaaaacaaucaaaau

SEQ ID NO: 44599 - RNA, 21 nt, Artificial Sequence
  RPE65 RNA guide
ccccugacuuaaaacccaccu

SEQ ID NO: 44600 - RNA, 21 nt, Artificial Sequence
  RPE65 RNA guide
cccuacuccccugacuuaaaa

SEQ ID NO: 44601 - RNA, 21 nt, Artificial Sequence
  RPE65 RNA guide
cccuauuugagugcacguuuc

SEQ ID NO: 44602 - RNA, 21 nt, Artificial Sequence
  RPE65 RNA guide
cccucuaaaacaaucaaaaug

SEQ ID NO: 44603 - RNA, 21 nt, Artificial Sequence
  RPE65 RNA guide
cccugacuuaaaacccaccuc

SEQ ID NO: 44604 - RNA, 21 nt, Artificial Sequence
  RPE65 RNA guide
cccuguacaguaauucuuaug

SEQ ID NO: 44605 - RNA, 21 nt, Artificial Sequence
  RPE65 RNA guide
ccuacuccccugacuuaaaac

SEQ ID NO: 44606 - RNA, 21 nt, Artificial Sequence
  RPE65 RNA guide
ccuauuugagugcacguuucc

SEQ ID NO: 44607 - RNA, 21 nt, Artificial Sequence
  RPE65 RNA guide
ccucaaacuuuagugugcauc

SEQ ID NO: 44608 - RNA, 21 nt, Artificial Sequence
  RPE65 RNA guide
ccucagaauggucaaaaugcc

SEQ ID NO: 44609 - RNA, 21 nt, Artificial Sequence
  RPE65 RNA guide
ccuccagcuauugcaagaugu

SEQ ID NO: 44610 - RNA, 21 nt, Artificial Sequence
  RPE65 RNA guide
ccugacuuaaaacccaccucc

SEQ ID NO: 44611 - RNA, 21 nt, Artificial Sequence
  RPE65 RNA guide
ccugggugauuuugcagcuuc

SEQ ID NO: 44612 - RNA, 21 nt, Artificial Sequence
  RPE65 RNA guide
ccuguacaguaauucuuaugc

SEQ ID NO: 44613 - RNA, 21 nt, Artificial Sequence
  RPE65 RNA guide
ccuguauaagcuguucuaaau

SEQ ID NO: 44614 - RNA, 21 nt, Artificial Sequence
  RPE65 RNA guide
ccuuugggcaucuuaagaugu

SEQ ID NO: 44615 - RNA, 21 nt, Artificial Sequence
  RPE65 RNA guide
ccuuuugcaacaucuuaagau

SEQ ID NO: 44616 - RNA, 21 nt, Artificial Sequence
  RPE65 RNA guide
cgugcacucaaauaggguugu

SEQ ID NO: 44617 - RNA, 21 nt, Artificial Sequence
  RPE65 RNA guide
cguuuccaaaucugcugcuau

SEQ ID NO: 44618 - RNA, 21 nt, Artificial Sequence
  RPE65 RNA guide
cuaaacuauauccuuugggca

SEQ ID NO: 44619 - RNA, 21 nt, Artificial Sequence
  RPE65 RNA guide
cuaaaguuugaggaccauuca

SEQ ID NO: 44620 - RNA, 21 nt, Artificial Sequence
  RPE65 RNA guide
cuaagaagugcaaaugaugga

SEQ ID NO: 44621 - RNA, 21 nt, Artificial Sequence
  RPE65 RNA guide
cuacacuccacuugccacaac

SEQ ID NO: 44622 - RNA, 21 nt, Artificial Sequence
  RPE65 RNA guide
cuacuccccugacuuaaaacc

SEQ ID NO: 44623 - RNA, 21 nt, Artificial Sequence
  RPE65 RNA guide
cuaguaagugaaugguccuca

SEQ ID NO: 44624 - RNA, 21 nt, Artificial Sequence
  RPE65 RNA guide
cuauauccuuugggcaucuua

SEQ ID NO: 44625 - RNA, 21 nt, Artificial Sequence
  RPE65 RNA guide
cuauugacacaaacccaucua

SEQ ID NO: 44626 - RNA, 21 nt, Artificial Sequence
  RPE65 RNA guide
cuauugcaagaugugacucca

SEQ ID NO: 44627 - RNA, 21 nt, Artificial Sequence
  RPE65 RNA guide
cuauuugagugcacguuucca

SEQ ID NO: 44628 - RNA, 21 nt, Artificial Sequence
  RPE65 RNA guide
cuauuuggauuuuccugggug

SEQ ID NO: 44629 - RNA, 21 nt, Artificial Sequence
  RPE65 RNA guide
cucaaauaggguuguggcaag

SEQ ID NO: 44630 - RNA, 21 nt, Artificial Sequence
  RPE65 RNA guide
cucacuaguaagugaaugguc

SEQ ID NO: 44631 - RNA, 21 nt, Artificial Sequence
  RPE65 RNA guide
cucagaauggucaaaaugccu

SEQ ID NO: 44632 - RNA, 21 nt, Artificial Sequence
  RPE65 RNA guide
cuccacuacacuccacuugcc

SEQ ID NO: 44633 - RNA, 21 nt, Artificial Sequence
  RPE65 RNA guide
cuccacuugccacaacccuau

SEQ ID NO: 44634 - RNA, 21 nt, Artificial Sequence
  RPE65 RNA guide
cuccagcuauugcaagaugug

SEQ ID NO: 44635 - RNA, 21 nt, Artificial Sequence
  RPE65 RNA guide
cuccaucauuugcacuucuua

SEQ ID NO: 44636 - RNA, 21 nt, Artificial Sequence
  RPE65 RNA guide
cuccccugacuuaaaacccac

SEQ ID NO: 44637 - RNA, 21 nt, Artificial Sequence
  RPE65 RNA guide
cucuuuaugugauucugaugc

SEQ ID NO: 44638 - RNA, 21 nt, Artificial Sequence
  RPE65 RNA guide
cugaaauaaagugguuuuaaa

SEQ ID NO: 44639 - RNA, 21 nt, Artificial Sequence
  RPE65 RNA guide
cugacuuaaaacccaccucca

SEQ ID NO: 44640 - RNA, 21 nt, Artificial Sequence
  RPE65 RNA guide
cugagguuucuucccuacucc

SEQ ID NO: 44641 - RNA, 21 nt, Artificial Sequence
  RPE65 RNA guide
cugcaaaaucacccaggaaaa

SEQ ID NO: 44642 - RNA, 21 nt, Artificial Sequence
  RPE65 RNA guide
cugcaaucaguauuuuaagaa

SEQ ID NO: 44643 - RNA, 21 nt, Artificial Sequence
  RPE65 RNA guide
cugcuauuuggauuuuccugg

SEQ ID NO: 44644 - RNA, 21 nt, Artificial Sequence
  RPE65 RNA guide
cugcugcuauuuggauuuucc

SEQ ID NO: 44645 - RNA, 21 nt, Artificial Sequence
  RPE65 RNA guide
cuggagguggguuuuaaguca

SEQ ID NO: 44646 - RNA, 21 nt, Artificial Sequence
  RPE65 RNA guide
cugggugauuuugcagcuuca

SEQ ID NO: 44647 - RNA, 21 nt, Artificial Sequence
  RPE65 RNA guide
cuguacagggcuauugacaca

SEQ ID NO: 44648 - RNA, 21 nt, Artificial Sequence
  RPE65 RNA guide
cuguacaguaauucuuaugca

SEQ ID NO: 44649 - RNA, 21 nt, Artificial Sequence
  RPE65 RNA guide
cuguauaagcuguucuaaaug

SEQ ID NO: 44650 - RNA, 21 nt, Artificial Sequence
  RPE65 RNA guide
cuuaaaacccaccuccagcua

SEQ ID NO: 44651 - RNA, 21 nt, Artificial Sequence
  RPE65 RNA guide
cuuaagaugcccaaaggauau

SEQ ID NO: 44652 - RNA, 21 nt, Artificial Sequence
  RPE65 RNA guide
cuuaagauguugcaaaaggca

SEQ ID NO: 44653 - RNA, 21 nt, Artificial Sequence
  RPE65 RNA guide
cuuagugaaauuucaugugaa

SEQ ID NO: 44654 - RNA, 21 nt, Artificial Sequence
  RPE65 RNA guide
cuuauacaggcaaagaaacac

SEQ ID NO: 44655 - RNA, 21 nt, Artificial Sequence
  RPE65 RNA guide
cuucacaugaaauuucacuaa

SEQ ID NO: 44656 - RNA, 21 nt, Artificial Sequence
  RPE65 RNA guide
cuuccaaagccuuuuaaaacc

SEQ ID NO: 44657 - RNA, 21 nt, Artificial Sequence
  RPE65 RNA guide
cuucccuacuccccugacuua

SEQ ID NO: 44658 - RNA, 21 nt, Artificial Sequence
  RPE65 RNA guide
cuucuuagugaaauuucaugu

SEQ ID NO: 44659 - RNA, 21 nt, Artificial Sequence
  RPE65 RNA guide
cuugcaauagcuggagguggg

SEQ ID NO: 44660 - RNA, 21 nt, Artificial Sequence
  RPE65 RNA guide
cuugccacaacccuauuugag

SEQ ID NO: 44661 - RNA, 21 nt, Artificial Sequence
  RPE65 RNA guide
cuuuagugugcaucagaauca

SEQ ID NO: 44662 - RNA, 21 nt, Artificial Sequence
  RPE65 RNA guide
cuuuaugugauucugaugcac

SEQ ID NO: 44663 - RNA, 21 nt, Artificial Sequence
  RPE65 RNA guide
cuuugccuguauaagcuguuc

SEQ ID NO: 44664 - RNA, 21 nt, Artificial Sequence
  RPE65 RNA guide
cuuugggcaucuuaagauguu

SEQ ID NO: 44665 - RNA, 21 nt, Artificial Sequence
  RPE65 RNA guide
cuuuugcaacaucuuaagaug

SEQ ID NO: 44666 - RNA, 21 nt, Artificial Sequence
  RPE65 RNA guide
gaaaauaaccccucuaaaaca

SEQ ID NO: 44667 - RNA, 21 nt, Artificial Sequence
  RPE65 RNA guide
gaaaauccaaauagcagcaga

SEQ ID NO: 44668 - RNA, 21 nt, Artificial Sequence
  RPE65 RNA guide
gaaaccucagaauggucaaaa

SEQ ID NO: 44669 - RNA, 21 nt, Artificial Sequence
  RPE65 RNA guide
gaaacgugcacucaaauaggg

SEQ ID NO: 44670 - RNA, 21 nt, Artificial Sequence
  RPE65 RNA guide
gaaacucuuuaugugauucug

SEQ ID NO: 44671 - RNA, 21 nt, Artificial Sequence
  RPE65 RNA guide
gaaauuucacuaagaagugca

SEQ ID NO: 44672 - RNA, 21 nt, Artificial Sequence
  RPE65 RNA guide
gaaauuucaugugaagcugca

SEQ ID NO: 44673 - RNA, 21 nt, Artificial Sequence
  RPE65 RNA guide
gaacagcuuauacaggcaaag

SEQ ID NO: 44674 - RNA, 21 nt, Artificial Sequence
  RPE65 RNA guide
gaagaaaccucagaaugguca

SEQ ID NO: 44675 - RNA, 21 nt, Artificial Sequence
  RPE65 RNA guide
gaagcugcaaaaucacccagg

SEQ ID NO: 44676 - RNA, 21 nt, Artificial Sequence
  RPE65 RNA guide
gaagugcaaaugauggagaaa

SEQ ID NO: 44677 - RNA, 21 nt, Artificial Sequence
  RPE65 RNA guide
gaauggucaaaaugccuuuug

SEQ ID NO: 44678 - RNA, 21 nt, Artificial Sequence
  RPE65 RNA guide
gaaugguccucaaacuuuagu

SEQ ID NO: 44679 - RNA, 21 nt, Artificial Sequence
  RPE65 RNA guide
gaauuacuguacagggcuauu

SEQ ID NO: 44680 - RNA, 21 nt, Artificial Sequence
  RPE65 RNA guide
gacacaaacccaucuaaacua

SEQ ID NO: 44681 - RNA, 21 nt, Artificial Sequence
  RPE65 RNA guide
gaccauucacuuacuagugag

SEQ ID NO: 44682 - RNA, 21 nt, Artificial Sequence
  RPE65 RNA guide
gaccauucugagguuucuucc

SEQ ID NO: 44683 - RNA, 21 nt, Artificial Sequence
  RPE65 RNA guide
gacuccacuacacuccacuug

SEQ ID NO: 44684 - RNA, 21 nt, Artificial Sequence
  RPE65 RNA guide
gacuuaaaacccaccuccagc

SEQ ID NO: 44685 - RNA, 21 nt, Artificial Sequence
  RPE65 RNA guide
gagaaaaugaaaauaaccccu

SEQ ID NO: 44686 - RNA, 21 nt, Artificial Sequence
  RPE65 RNA guide
gaggaccauucacuuacuagu

SEQ ID NO: 44687 - RNA, 21 nt, Artificial Sequence
  RPE65 RNA guide
gagggguuauuuucauuuucu

SEQ ID NO: 44688 - RNA, 21 nt, Artificial Sequence
  RPE65 RNA guide
gagguggguuuuaagucaggg

SEQ ID NO: 44689 - RNA, 21 nt, Artificial Sequence
  RPE65 RNA guide
gagguuucuucccuacucccc

SEQ ID NO: 44690 - RNA, 21 nt, Artificial Sequence
  RPE65 RNA guide
gaguagggaagaaaccucaga

SEQ ID NO: 44691 - RNA, 21 nt, Artificial Sequence
  RPE65 RNA guide
gagucacaucuugcaauagcu

SEQ ID NO: 44692 - RNA, 21 nt, Artificial Sequence
  RPE65 RNA guide
gagugcacguuuccaaaucug

SEQ ID NO: 44693 - RNA, 21 nt, Artificial Sequence
  RPE65 RNA guide
gaguguaguggagucacaucu

SEQ ID NO: 44694 - RNA, 21 nt, Artificial Sequence
  RPE65 RNA guide
gaguuucuuaaaauacugauu

SEQ ID NO: 44695 - RNA, 21 nt, Artificial Sequence
  RPE65 RNA guide
gauauaguuuagauggguuug

SEQ ID NO: 44696 - RNA, 21 nt, Artificial Sequence
  RPE65 RNA guide
gaugcacacuaaaguuugagg

SEQ ID NO: 44697 - RNA, 21 nt, Artificial Sequence
  RPE65 RNA guide
gaugcccaaaggauauaguuu

SEQ ID NO: 44698 - RNA, 21 nt, Artificial Sequence
  RPE65 RNA guide
gauggagaaaaugaaaauaac

SEQ ID NO: 44699 - RNA, 21 nt, Artificial Sequence
  RPE65 RNA guide
gauggguuugugucaauagcc

SEQ ID NO: 44700 - RNA, 21 nt, Artificial Sequence
  RPE65 RNA guide
gaugugacuccacuacacucc

SEQ ID NO: 44701 - RNA, 21 nt, Artificial Sequence
  RPE65 RNA guide
gauguugcaaaaggcauuuug

SEQ ID NO: 44702 - RNA, 21 nt, Artificial Sequence
  RPE65 RNA guide
gauuguuuuagagggguuauu

SEQ ID NO: 44703 - RNA, 21 nt, Artificial Sequence
  RPE65 RNA guide
gauuuggaaacgugcacucaa

SEQ ID NO: 44704 - RNA, 21 nt, Artificial Sequence
  RPE65 RNA guide
gauuuuccugggugauuuugc

SEQ ID NO: 44705 - RNA, 21 nt, Artificial Sequence
  RPE65 RNA guide
gauuuugcagcuucacaugaa

SEQ ID NO: 44706 - RNA, 21 nt, Artificial Sequence
  RPE65 RNA guide
gcaaaaggcauuuugaccauu

SEQ ID NO: 44707 - RNA, 21 nt, Artificial Sequence
  RPE65 RNA guide
gcaaaaucacccaggaaaauc

SEQ ID NO: 44708 - RNA, 21 nt, Artificial Sequence
  RPE65 RNA guide
gcaacaucuuaagaugcccaa

SEQ ID NO: 44709 - RNA, 21 nt, Artificial Sequence
  RPE65 RNA guide
gcaagaugugacuccacuaca

SEQ ID NO: 44710 - RNA, 21 nt, Artificial Sequence
  RPE65 RNA guide
gcaaguggaguguaguggagu

SEQ ID NO: 44711 - RNA, 21 nt, Artificial Sequence
  RPE65 RNA guide
gcaauagcuggagguggguuu

SEQ ID NO: 44712 - RNA, 21 nt, Artificial Sequence
  RPE65 RNA guide
gcacacuaaaguuugaggacc

SEQ ID NO: 44713 - RNA, 21 nt, Artificial Sequence
  RPE65 RNA guide
gcacguuuccaaaucugcugc

SEQ ID NO: 44714 - RNA, 21 nt, Artificial Sequence
  RPE65 RNA guide
gcacucaaauaggguuguggc

SEQ ID NO: 44715 - RNA, 21 nt, Artificial Sequence
  RPE65 RNA guide
gcacuucuuagugaaauuuca

SEQ ID NO: 44716 - RNA, 21 nt, Artificial Sequence
  RPE65 RNA guide
gcagauuuggaaacgugcacu

SEQ ID NO: 44717 - RNA, 21 nt, Artificial Sequence
  RPE65 RNA guide
gcagcagauuuggaaacgugc

SEQ ID NO: 44718 - RNA, 21 nt, Artificial Sequence
  RPE65 RNA guide
gcagcuucacaugaaauuuca

SEQ ID NO: 44719 - RNA, 21 nt, Artificial Sequence
  RPE65 RNA guide
gcauaagaauuacuguacagg

SEQ ID NO: 44720 - RNA, 21 nt, Artificial Sequence
  RPE65 RNA guide
gcaucagaaucacauaaagag

SEQ ID NO: 44721 - RNA, 21 nt, Artificial Sequence
  RPE65 RNA guide
gcaucuuaagauguugcaaaa

SEQ ID NO: 44722 - RNA, 21 nt, Artificial Sequence
  RPE65 RNA guide
gcauuuagaacagcuuauaca

SEQ ID NO: 44723 - RNA, 21 nt, Artificial Sequence
  RPE65 RNA guide
gcauuuugaccauucugaggu

SEQ ID NO: 44724 - RNA, 21 nt, Artificial Sequence
  RPE65 RNA guide
gccacaacccuauuugagugc

SEQ ID NO: 44725 - RNA, 21 nt, Artificial Sequence
  RPE65 RNA guide
gcccaaaggauauaguuuaga

SEQ ID NO: 44726 - RNA, 21 nt, Artificial Sequence
  RPE65 RNA guide
gcccuguacaguaauucuuau

SEQ ID NO: 44727 - RNA, 21 nt, Artificial Sequence
  RPE65 RNA guide
gccuguauaagcuguucuaaa

SEQ ID NO: 44728 - RNA, 21 nt, Artificial Sequence
  RPE65 RNA guide
gccuuuuaaaaccacuuuauu

SEQ ID NO: 44729 - RNA, 21 nt, Artificial Sequence
  RPE65 RNA guide
gccuuuugcaacaucuuaaga

SEQ ID NO: 44730 - RNA, 21 nt, Artificial Sequence
  RPE65 RNA guide
gcuauugacacaaacccaucu

SEQ ID NO: 44731 - RNA, 21 nt, Artificial Sequence
  RPE65 RNA guide
gcuauugcaagaugugacucc

SEQ ID NO: 44732 - RNA, 21 nt, Artificial Sequence
  RPE65 RNA guide
gcuauuuggauuuuccugggu

SEQ ID NO: 44733 - RNA, 21 nt, Artificial Sequence
  RPE65 RNA guide
gcugcaaaaucacccaggaaa

SEQ ID NO: 44734 - RNA, 21 nt, Artificial Sequence
  RPE65 RNA guide
gcugcuauuuggauuuuccug

SEQ ID NO: 44735 - RNA, 21 nt, Artificial Sequence
  RPE65 RNA guide
gcuggagguggguuuuaaguc

SEQ ID NO: 44736 - RNA, 21 nt, Artificial Sequence
  RPE65 RNA guide
gcuuauacaggcaaagaaaca

SEQ ID NO: 44737 - RNA, 21 nt, Artificial Sequence
  RPE65 RNA guide
gcuucacaugaaauuucacua

SEQ ID NO: 44738 - RNA, 21 nt, Artificial Sequence
  RPE65 RNA guide
ggaaaauccaaauagcagcag

SEQ ID NO: 44739 - RNA, 21 nt, Artificial Sequence
  RPE65 RNA guide
ggaaacgugcacucaaauagg

SEQ ID NO: 44740 - RNA, 21 nt, Artificial Sequence
  RPE65 RNA guide
ggaagaaaccucagaaugguc

SEQ ID NO: 44741 - RNA, 21 nt, Artificial Sequence
  RPE65 RNA guide
ggaccauucacuuacuaguga

SEQ ID NO: 44742 - RNA, 21 nt, Artificial Sequence
  RPE65 RNA guide
ggagaaaaugaaaauaacccc

SEQ ID NO: 44743 - RNA, 21 nt, Artificial Sequence
  RPE65 RNA guide
ggagguggguuuuaagucagg

SEQ ID NO: 44744 - RNA, 21 nt, Artificial Sequence
  RPE65 RNA guide
ggaguagggaagaaaccucag

SEQ ID NO: 44745 - RNA, 21 nt, Artificial Sequence
  RPE65 RNA guide
ggagucacaucuugcaauagc

SEQ ID NO: 44746 - RNA, 21 nt, Artificial Sequence
  RPE65 RNA guide
ggaguguaguggagucacauc

SEQ ID NO: 44747 - RNA, 21 nt, Artificial Sequence
  RPE65 RNA guide
ggauauaguuuagauggguuu

SEQ ID NO: 44748 - RNA, 21 nt, Artificial Sequence
  RPE65 RNA guide
ggauuuuccugggugauuuug

SEQ ID NO: 44749 - RNA, 21 nt, Artificial Sequence
  RPE65 RNA guide
ggcaaagaaacacauuuugau

SEQ ID NO: 44750 - RNA, 21 nt, Artificial Sequence
  RPE65 RNA guide
ggcaaguggaguguaguggag

SEQ ID NO: 44751 - RNA, 21 nt, Artificial Sequence
  RPE65 RNA guide
ggcaucuuaagauguugcaaa

SEQ ID NO: 44752 - RNA, 21 nt, Artificial Sequence
  RPE65 RNA guide
ggcauuuugaccauucugagg

SEQ ID NO: 44753 - RNA, 21 nt, Artificial Sequence
  RPE65 RNA guide
ggcuauugacacaaacccauc

SEQ ID NO: 44754 - RNA, 21 nt, Artificial Sequence
  RPE65 RNA guide
gggaagaaaccucagaauggu

SEQ ID NO: 44755 - RNA, 21 nt, Artificial Sequence
  RPE65 RNA guide
gggaguagggaagaaaccuca

SEQ ID NO: 44756 - RNA, 21 nt, Artificial Sequence
  RPE65 RNA guide
gggcaucuuaagauguugcaa

SEQ ID NO: 44757 - RNA, 21 nt, Artificial Sequence
  RPE65 RNA guide
gggcuauugacacaaacccau

SEQ ID NO: 44758 - RNA, 21 nt, Artificial Sequence
  RPE65 RNA guide
ggggaguagggaagaaaccuc

SEQ ID NO: 44759 - RNA, 21 nt, Artificial Sequence
  RPE65 RNA guide
gggguuauuuucauuuucucc

SEQ ID NO: 44760 - RNA, 21 nt, Artificial Sequence
  RPE65 RNA guide
gggugauuuugcagcuucaca

SEQ ID NO: 44761 - RNA, 21 nt, Artificial Sequence
  RPE65 RNA guide
ggguuauuuucauuuucucca

SEQ ID NO: 44762 - RNA, 21 nt, Artificial Sequence
  RPE65 RNA guide
ggguuguggcaaguggagugu

SEQ ID NO: 44763 - RNA, 21 nt, Artificial Sequence
  RPE65 RNA guide
ggguuugugucaauagcccug

SEQ ID NO: 44764 - RNA, 21 nt, Artificial Sequence
  RPE65 RNA guide
ggguuuuaagucaggggagua

SEQ ID NO: 44765 - RNA, 21 nt, Artificial Sequence
  RPE65 RNA guide
ggucaaaaugccuuuugcaac

SEQ ID NO: 44766 - RNA, 21 nt, Artificial Sequence
  RPE65 RNA guide
ggugauuuugcagcuucacau

SEQ ID NO: 44767 - RNA, 21 nt, Artificial Sequence
  RPE65 RNA guide
gguggguuuuaagucagggga

SEQ ID NO: 44768 - RNA, 21 nt, Artificial Sequence
  RPE65 RNA guide
gguuguggcaaguggagugua

SEQ ID NO: 44769 - RNA, 21 nt, Artificial Sequence
  RPE65 RNA guide
gguuucuucccuacuccccug

SEQ ID NO: 44770 - RNA, 21 nt, Artificial Sequence
  RPE65 RNA guide
gguuugugucaauagcccugu

SEQ ID NO: 44771 - RNA, 21 nt, Artificial Sequence
  RPE65 RNA guide
gguuuuaagucaggggaguag

SEQ ID NO: 44772 - RNA, 21 nt, Artificial Sequence
  RPE65 RNA guide
guaagugaaugguccucaaac

SEQ ID NO: 44773 - RNA, 21 nt, Artificial Sequence
  RPE65 RNA guide
guacagggcuauugacacaaa

SEQ ID NO: 44774 - RNA, 21 nt, Artificial Sequence
  RPE65 RNA guide
guagggaagaaaccucagaau

SEQ ID NO: 44775 - RNA, 21 nt, Artificial Sequence
  RPE65 RNA guide
guaguggagucacaucuugca

SEQ ID NO: 44776 - RNA, 21 nt, Artificial Sequence
  RPE65 RNA guide
guauaagcuguucuaaaugcu

SEQ ID NO: 44777 - RNA, 21 nt, Artificial Sequence
  RPE65 RNA guide
gucaaaaugccuuuugcaaca

SEQ ID NO: 44778 - RNA, 21 nt, Artificial Sequence
  RPE65 RNA guide
gucaauagcccuguacaguaa

SEQ ID NO: 44779 - RNA, 21 nt, Artificial Sequence
  RPE65 RNA guide
gucacaucuugcaauagcugg

SEQ ID NO: 44780 - RNA, 21 nt, Artificial Sequence
  RPE65 RNA guide
gucaggggaguagggaagaaa

SEQ ID NO: 44781 - RNA, 21 nt, Artificial Sequence
  RPE65 RNA guide
gugaaauuucaugugaagcug

SEQ ID NO: 44782 - RNA, 21 nt, Artificial Sequence
  RPE65 RNA guide
gugaagcugcaaaaucaccca

SEQ ID NO: 44783 - RNA, 21 nt, Artificial Sequence
  RPE65 RNA guide
gugaaugguccucaaacuuua

SEQ ID NO: 44784 - RNA, 21 nt, Artificial Sequence
  RPE65 RNA guide
gugacuccacuacacuccacu

SEQ ID NO: 44785 - RNA, 21 nt, Artificial Sequence
  RPE65 RNA guide
gugauuuugcagcuucacaug

SEQ ID NO: 44786 - RNA, 21 nt, Artificial Sequence
  RPE65 RNA guide
gugcaaaugauggagaaaaug

SEQ ID NO: 44787 - RNA, 21 nt, Artificial Sequence
  RPE65 RNA guide
gugcacguuuccaaaucugcu

SEQ ID NO: 44788 - RNA, 21 nt, Artificial Sequence
  RPE65 RNA guide
gugcacucaaauaggguugug

SEQ ID NO: 44789 - RNA, 21 nt, Artificial Sequence
  RPE65 RNA guide
gugcauaagaauuacuguaca

SEQ ID NO: 44790 - RNA, 21 nt, Artificial Sequence
  RPE65 RNA guide
gugcaucagaaucacauaaag

SEQ ID NO: 44791 - RNA, 21 nt, Artificial Sequence
  RPE65 RNA guide
guggagucacaucuugcaaua

SEQ ID NO: 44792 - RNA, 21 nt, Artificial Sequence
  RPE65 RNA guide
guggaguguaguggagucaca

SEQ ID NO: 44793 - RNA, 21 nt, Artificial Sequence
  RPE65 RNA guide
guggcaaguggaguguagugg

SEQ ID NO: 44794 - RNA, 21 nt, Artificial Sequence
  RPE65 RNA guide
guggguuuuaagucaggggag

SEQ ID NO: 44795 - RNA, 21 nt, Artificial Sequence
  RPE65 RNA guide
guguaguggagucacaucuug

SEQ ID NO: 44796 - RNA, 21 nt, Artificial Sequence
  RPE65 RNA guide
gugucaauagcccuguacagu

SEQ ID NO: 44797 - RNA, 21 nt, Artificial Sequence
  RPE65 RNA guide
gugugcaucagaaucacauaa

SEQ ID NO: 44798 - RNA, 21 nt, Artificial Sequence
  RPE65 RNA guide
guguuucuuugccuguauaag

SEQ ID NO: 44799 - RNA, 21 nt, Artificial Sequence
  RPE65 RNA guide
guugcaaaaggcauuuugacc

SEQ ID NO: 44800 - RNA, 21 nt, Artificial Sequence
  RPE65 RNA guide
guuguggcaaguggaguguag

SEQ ID NO: 44801 - RNA, 21 nt, Artificial Sequence
  RPE65 RNA guide
guuuagauggguuugugucaa

SEQ ID NO: 44802 - RNA, 21 nt, Artificial Sequence
  RPE65 RNA guide
guuuccaaaucugcugcuauu

SEQ ID NO: 44803 - RNA, 21 nt, Artificial Sequence
  RPE65 RNA guide
guuucuucccuacuccccuga

SEQ ID NO: 44804 - RNA, 21 nt, Artificial Sequence
  RPE65 RNA guide
guuucuuugccuguauaagcu

SEQ ID NO: 44805 - RNA, 21 nt, Artificial Sequence
  RPE65 RNA guide
guuugaggaccauucacuuac

SEQ ID NO: 44806 - RNA, 21 nt, Artificial Sequence
  RPE65 RNA guide
guuugugucaauagcccugua

SEQ ID NO: 44807 - RNA, 21 nt, Artificial Sequence
  RPE65 RNA guide
guuuuaagucaggggaguagg

SEQ ID NO: 44808 - RNA, 21 nt, Artificial Sequence
  RPE65 RNA guide
uaaaacccaccuccagcuauu

SEQ ID NO: 44809 - RNA, 21 nt, Artificial Sequence
  RPE65 RNA guide
uaaacuauauccuuugggcau

SEQ ID NO: 44810 - RNA, 21 nt, Artificial Sequence
  RPE65 RNA guide
uaaagugguuuuaaaaggcuu

SEQ ID NO: 44811 - RNA, 21 nt, Artificial Sequence
  RPE65 RNA guide
uaaaguuugaggaccauucac

SEQ ID NO: 44812 - RNA, 21 nt, Artificial Sequence
  RPE65 RNA guide
uaaccccucuaaaacaaucaa

SEQ ID NO: 44813 - RNA, 21 nt, Artificial Sequence
  RPE65 RNA guide
uaagaagugcaaaugauggag

SEQ ID NO: 44814 - RNA, 21 nt, Artificial Sequence
  RPE65 RNA guide
uaagaauuacuguacagggcu

SEQ ID NO: 44815 - RNA, 21 nt, Artificial Sequence
  RPE65 RNA guide
uaagaugcccaaaggauauag

SEQ ID NO: 44816 - RNA, 21 nt, Artificial Sequence
  RPE65 RNA guide
uaagauguugcaaaaggcauu

SEQ ID NO: 44817 - RNA, 21 nt, Artificial Sequence
  RPE65 RNA guide
uaagucaggggaguagggaag

SEQ ID NO: 44818 - RNA, 21 nt, Artificial Sequence
  RPE65 RNA guide
uaagugaaugguccucaaacu

SEQ ID NO: 44819 - RNA, 21 nt, Artificial Sequence
  RPE65 RNA guide
uacacuccacuugccacaacc

SEQ ID NO: 44820 - RNA, 21 nt, Artificial Sequence
  RPE65 RNA guide
uacaggcaaagaaacacauuu

SEQ ID NO: 44821 - RNA, 21 nt, Artificial Sequence
  RPE65 RNA guide
uacagggcuauugacacaaac

SEQ ID NO: 44822 - RNA, 21 nt, Artificial Sequence
  RPE65 RNA guide
uacucacuaguaagugaaugg

SEQ ID NO: 44823 - RNA, 21 nt, Artificial Sequence
  RPE65 RNA guide
uacuccccugacuuaaaaccc

SEQ ID NO: 44824 - RNA, 21 nt, Artificial Sequence
  RPE65 RNA guide
uacuguacagggcuauugaca

SEQ ID NO: 44825 - RNA, 21 nt, Artificial Sequence
  RPE65 RNA guide
uagaacagcuuauacaggcaa

SEQ ID NO: 44826 - RNA, 21 nt, Artificial Sequence
  RPE65 RNA guide
uagagggguuauuuucauuuu

SEQ ID NO: 44827 - RNA, 21 nt, Artificial Sequence
  RPE65 RNA guide
uagauggguuugugucaauag

SEQ ID NO: 44828 - RNA, 21 nt, Artificial Sequence
  RPE65 RNA guide
uagcagcagauuuggaaacgu

SEQ ID NO: 44829 - RNA, 21 nt, Artificial Sequence
  RPE65 RNA guide
uagcccuguacaguaauucuu

SEQ ID NO: 44830 - RNA, 21 nt, Artificial Sequence
  RPE65 RNA guide
uagcuggagguggguuuuaag

SEQ ID NO: 44831 - RNA, 21 nt, Artificial Sequence
  RPE65 RNA guide
uagggaagaaaccucagaaug

SEQ ID NO: 44832 - RNA, 21 nt, Artificial Sequence
  RPE65 RNA guide
uaggguuguggcaaguggagu

SEQ ID NO: 44833 - RNA, 21 nt, Artificial Sequence
  RPE65 RNA guide
uaguaagugaaugguccucaa

SEQ ID NO: 44834 - RNA, 21 nt, Artificial Sequence
  RPE65 RNA guide
uagugaaauuucaugugaagc

SEQ ID NO: 44835 - RNA, 21 nt, Artificial Sequence
  RPE65 RNA guide
uaguggagucacaucuugcaa

SEQ ID NO: 44836 - RNA, 21 nt, Artificial Sequence
  RPE65 RNA guide
uagugugcaucagaaucacau

SEQ ID NO: 44837 - RNA, 21 nt, Artificial Sequence
  RPE65 RNA guide
uaguuuagauggguuuguguc

SEQ ID NO: 44838 - RNA, 21 nt, Artificial Sequence
  RPE65 RNA guide
uauacaggcaaagaaacacau

SEQ ID NO: 44839 - RNA, 21 nt, Artificial Sequence
  RPE65 RNA guide
uauaguuuagauggguuugug

SEQ ID NO: 44840 - RNA, 21 nt, Artificial Sequence
  RPE65 RNA guide
uauauccuuugggcaucuuaa

SEQ ID NO: 44841 - RNA, 21 nt, Artificial Sequence
  RPE65 RNA guide
uauccuuugggcaucuuaaga

SEQ ID NO: 44842 - RNA, 21 nt, Artificial Sequence
  RPE65 RNA guide
uaugugauucugaugcacacu

SEQ ID NO: 44843 - RNA, 21 nt, Artificial Sequence
  RPE65 RNA guide
uauugacacaaacccaucuaa

SEQ ID NO: 44844 - RNA, 21 nt, Artificial Sequence
  RPE65 RNA guide
uauugcaagaugugacuccac

SEQ ID NO: 44845 - RNA, 21 nt, Artificial Sequence
  RPE65 RNA guide
uauuugagugcacguuuccaa

SEQ ID NO: 44846 - RNA, 21 nt, Artificial Sequence
  RPE65 RNA guide
uauuuggauuuuccuggguga

SEQ ID NO: 44847 - RNA, 21 nt, Artificial Sequence
  RPE65 RNA guide
ucaaaaugccuuuugcaacau

SEQ ID NO: 44848 - RNA, 21 nt, Artificial Sequence
  RPE65 RNA guide
ucaaaauguguuucuuugccu

SEQ ID NO: 44849 - RNA, 21 nt, Artificial Sequence
  RPE65 RNA guide
ucaaauaggguuguggcaagu

SEQ ID NO: 44850 - RNA, 21 nt, Artificial Sequence
  RPE65 RNA guide
ucaauagcccuguacaguaau

SEQ ID NO: 44851 - RNA, 21 nt, Artificial Sequence
  RPE65 RNA guide
ucacaucuugcaauagcugga

SEQ ID NO: 44852 - RNA, 21 nt, Artificial Sequence
  RPE65 RNA guide
ucacaugaaauuucacuaaga

SEQ ID NO: 44853 - RNA, 21 nt, Artificial Sequence
  RPE65 RNA guide
ucacccaggaaaauccaaaua

SEQ ID NO: 44854 - RNA, 21 nt, Artificial Sequence
  RPE65 RNA guide
ucacuaagaagugcaaaugau

SEQ ID NO: 44855 - RNA, 21 nt, Artificial Sequence
  RPE65 RNA guide
ucacuaguaagugaauggucc

SEQ ID NO: 44856 - RNA, 21 nt, Artificial Sequence
  RPE65 RNA guide
ucagaauggucaaaaugccuu

SEQ ID NO: 44857 - RNA, 21 nt, Artificial Sequence
  RPE65 RNA guide
ucaggggaguagggaagaaac

SEQ ID NO: 44858 - RNA, 21 nt, Artificial Sequence
  RPE65 RNA guide
ucaugugaagcugcaaaauca

SEQ ID NO: 44859 - RNA, 21 nt, Artificial Sequence
  RPE65 RNA guide
ucauuuucuccaucauuugca

SEQ ID NO: 44860 - RNA, 21 nt, Artificial Sequence
  RPE65 RNA guide
uccaaagccuuuuaaaaccac

SEQ ID NO: 44861 - RNA, 21 nt, Artificial Sequence
  RPE65 RNA guide
uccaaauagcagcagauuugg

SEQ ID NO: 44862 - RNA, 21 nt, Artificial Sequence
  RPE65 RNA guide
uccaaaucugcugcuauuugg

SEQ ID NO: 44863 - RNA, 21 nt, Artificial Sequence
  RPE65 RNA guide
uccacuacacuccacuugcca

SEQ ID NO: 44864 - RNA, 21 nt, Artificial Sequence
  RPE65 RNA guide
uccacuugccacaacccuauu

SEQ ID NO: 44865 - RNA, 21 nt, Artificial Sequence
  RPE65 RNA guide
uccagcuauugcaagauguga

SEQ ID NO: 44866 - RNA, 21 nt, Artificial Sequence
  RPE65 RNA guide
uccaucauuugcacuucuuag

SEQ ID NO: 44867 - RNA, 21 nt, Artificial Sequence
  RPE65 RNA guide
uccccugacuuaaaacccacc

SEQ ID NO: 44868 - RNA, 21 nt, Artificial Sequence
  RPE65 RNA guide
ucccuacuccccugacuuaaa

SEQ ID NO: 44869 - RNA, 21 nt, Artificial Sequence
  RPE65 RNA guide
uccugggugauuuugcagcuu

SEQ ID NO: 44870 - RNA, 21 nt, Artificial Sequence
  RPE65 RNA guide
uccuuugggcaucuuaagaug

SEQ ID NO: 44871 - RNA, 21 nt, Artificial Sequence
  RPE65 RNA guide
ucuaaacuauauccuuugggc

SEQ ID NO: 44872 - RNA, 21 nt, Artificial Sequence
  RPE65 RNA guide
ucuccaucauuugcacuucuu

SEQ ID NO: 44873 - RNA, 21 nt, Artificial Sequence
  RPE65 RNA guide
ucugagguuucuucccuacuc

SEQ ID NO: 44874 - RNA, 21 nt, Artificial Sequence
  RPE65 RNA guide
ucugcugcuauuuggauuuuc

SEQ ID NO: 44875 - RNA, 21 nt, Artificial Sequence
  RPE65 RNA guide
ucuuaagaugcccaaaggaua

SEQ ID NO: 44876 - RNA, 21 nt, Artificial Sequence
  RPE65 RNA guide
ucuuaagauguugcaaaaggc

SEQ ID NO: 44877 - RNA, 21 nt, Artificial Sequence
  RPE65 RNA guide
ucuuagugaaauuucauguga

SEQ ID NO: 44878 - RNA, 21 nt, Artificial Sequence
  RPE65 RNA guide
ucuucccuacuccccugacuu

SEQ ID NO: 44879 - RNA, 21 nt, Artificial Sequence
  RPE65 RNA guide
ucuugcaauagcuggaggugg

SEQ ID NO: 44880 - RNA, 21 nt, Artificial Sequence
  RPE65 RNA guide
ucuuuaugugauucugaugca

SEQ ID NO: 44881 - RNA, 21 nt, Artificial Sequence
  RPE65 RNA guide
ucuuugccuguauaagcuguu

SEQ ID NO: 44882 - RNA, 21 nt, Artificial Sequence
  RPE65 RNA guide
ugaaaauaaccccucuaaaac

SEQ ID NO: 44883 - RNA, 21 nt, Artificial Sequence
  RPE65 RNA guide
ugaaauuucaugugaagcugc

SEQ ID NO: 44884 - RNA, 21 nt, Artificial Sequence
  RPE65 RNA guide
ugaagcugcaaaaucacccag

SEQ ID NO: 44885 - RNA, 21 nt, Artificial Sequence
  RPE65 RNA guide
ugaaugguccucaaacuuuag

SEQ ID NO: 44886 - RNA, 21 nt, Artificial Sequence
  RPE65 RNA guide
ugacacaaacccaucuaaacu

SEQ ID NO: 44887 - RNA, 21 nt, Artificial Sequence
  RPE65 RNA guide
ugaccauucugagguuucuuc

SEQ ID NO: 44888 - RNA, 21 nt, Artificial Sequence
  RPE65 RNA guide
ugacuccacuacacuccacuu

SEQ ID NO: 44889 - RNA, 21 nt, Artificial Sequence
  RPE65 RNA guide
ugacuuaaaacccaccuccag

SEQ ID NO: 44890 - RNA, 21 nt, Artificial Sequence
  RPE65 RNA guide
ugaggaccauucacuuacuag

SEQ ID NO: 44891 - RNA, 21 nt, Artificial Sequence
  RPE65 RNA guide
ugagguuucuucccuacuccc

SEQ ID NO: 44892 - RNA, 21 nt, Artificial Sequence
  RPE65 RNA guide
ugagugcacguuuccaaaucu

SEQ ID NO: 44893 - RNA, 21 nt, Artificial Sequence
  RPE65 RNA guide
ugauggagaaaaugaaaauaa

SEQ ID NO: 44894 - RNA, 21 nt, Artificial Sequence
  RPE65 RNA guide
ugauuguuuuagagggguuau

SEQ ID NO: 44895 - RNA, 21 nt, Artificial Sequence
  RPE65 RNA guide
ugauuuugcagcuucacauga

SEQ ID NO: 44896 - RNA, 21 nt, Artificial Sequence
  RPE65 RNA guide
ugcaaaaggcauuuugaccau

SEQ ID NO: 44897 - RNA, 21 nt, Artificial Sequence
  RPE65 RNA guide
ugcaaaaucacccaggaaaau

SEQ ID NO: 44898 - RNA, 21 nt, Artificial Sequence
  RPE65 RNA guide
ugcaacaucuuaagaugccca

SEQ ID NO: 44899 - RNA, 21 nt, Artificial Sequence
  RPE65 RNA guide
ugcaagaugugacuccacuac

SEQ ID NO: 44900 - RNA, 21 nt, Artificial Sequence
  RPE65 RNA guide
ugcaauagcuggagguggguu

SEQ ID NO: 44901 - RNA, 21 nt, Artificial Sequence
  RPE65 RNA guide
ugcacacuaaaguuugaggac

SEQ ID NO: 44902 - RNA, 21 nt, Artificial Sequence
  RPE65 RNA guide
ugcacguuuccaaaucugcug

SEQ ID NO: 44903 - RNA, 21 nt, Artificial Sequence
  RPE65 RNA guide
ugcacucaaauaggguugugg

SEQ ID NO: 44904 - RNA, 21 nt, Artificial Sequence
  RPE65 RNA guide
ugcacuucuuagugaaauuuc

SEQ ID NO: 44905 - RNA, 21 nt, Artificial Sequence
  RPE65 RNA guide
ugcagcuucacaugaaauuuc

SEQ ID NO: 44906 - RNA, 21 nt, Artificial Sequence
  RPE65 RNA guide
ugcauaagaauuacuguacag

SEQ ID NO: 44907 - RNA, 21 nt, Artificial Sequence
  RPE65 RNA guide
ugcaucagaaucacauaaaga

SEQ ID NO: 44908 - RNA, 21 nt, Artificial Sequence
  RPE65 RNA guide
ugccacaacccuauuugagug

SEQ ID NO: 44909 - RNA, 21 nt, Artificial Sequence
  RPE65 RNA guide
ugcccaaaggauauaguuuag

SEQ ID NO: 44910 - RNA, 21 nt, Artificial Sequence
  RPE65 RNA guide
ugccuguauaagcuguucuaa

SEQ ID NO: 44911 - RNA, 21 nt, Artificial Sequence
  RPE65 RNA guide
ugccuuuugcaacaucuuaag

SEQ ID NO: 44912 - RNA, 21 nt, Artificial Sequence
  RPE65 RNA guide
ugcuauuuggauuuuccuggg

SEQ ID NO: 44913 - RNA, 21 nt, Artificial Sequence
  RPE65 RNA guide
ugcugcuauuuggauuuuccu

SEQ ID NO: 44914 - RNA, 21 nt, Artificial Sequence
  RPE65 RNA guide
uggaaacgugcacucaaauag

SEQ ID NO: 44915 - RNA, 21 nt, Artificial Sequence
  RPE65 RNA guide
uggagaaaaugaaaauaaccc

SEQ ID NO: 44916 - RNA, 21 nt, Artificial Sequence
  RPE65 RNA guide
uggagguggguuuuaagucag

SEQ ID NO: 44917 - RNA, 21 nt, Artificial Sequence
  RPE65 RNA guide
uggagucacaucuugcaauag

SEQ ID NO: 44918 - RNA, 21 nt, Artificial Sequence
  RPE65 RNA guide
uggaguguaguggagucacau

SEQ ID NO: 44919 - RNA, 21 nt, Artificial Sequence
  RPE65 RNA guide
uggauuuuccugggugauuuu

SEQ ID NO: 44920 - RNA, 21 nt, Artificial Sequence
  RPE65 RNA guide
uggcaaguggaguguagugga

SEQ ID NO: 44921 - RNA, 21 nt, Artificial Sequence
  RPE65 RNA guide
ugggcaucuuaagauguugca

SEQ ID NO: 44922 - RNA, 21 nt, Artificial Sequence
  RPE65 RNA guide
ugggugauuuugcagcuucac

SEQ ID NO: 44923 - RNA, 21 nt, Artificial Sequence
  RPE65 RNA guide
uggguuugugucaauagcccu

SEQ ID NO: 44924 - RNA, 21 nt, Artificial Sequence
  RPE65 RNA guide
uggguuuuaagucaggggagu

SEQ ID NO: 44925 - RNA, 21 nt, Artificial Sequence
  RPE65 RNA guide
uggucaaaaugccuuuugcaa

SEQ ID NO: 44926 - RNA, 21 nt, Artificial Sequence
  RPE65 RNA guide
ugguccucaaacuuuagugug

SEQ ID NO: 44927 - RNA, 21 nt, Artificial Sequence
  RPE65 RNA guide
uguacagggcuauugacacaa

SEQ ID NO: 44928 - RNA, 21 nt, Artificial Sequence
  RPE65 RNA guide
uguaguggagucacaucuugc

SEQ ID NO: 44929 - RNA, 21 nt, Artificial Sequence
  RPE65 RNA guide
uguauaagcuguucuaaaugc

SEQ ID NO: 44930 - RNA, 21 nt, Artificial Sequence
  RPE65 RNA guide
ugucaauagcccuguacagua

SEQ ID NO: 44931 - RNA, 21 nt, Artificial Sequence
  RPE65 RNA guide
ugugaagcugcaaaaucaccc

SEQ ID NO: 44932 - RNA, 21 nt, Artificial Sequence
  RPE65 RNA guide
ugugacuccacuacacuccac

SEQ ID NO: 44933 - RNA, 21 nt, Artificial Sequence
  RPE65 RNA guide
ugugauucugaugcacacuaa

SEQ ID NO: 44934 - RNA, 21 nt, Artificial Sequence
  RPE65 RNA guide
ugugcauaagaauuacuguac

SEQ ID NO: 44935 - RNA, 21 nt, Artificial Sequence
  RPE65 RNA guide
ugugcaucagaaucacauaaa

SEQ ID NO: 44936 - RNA, 21 nt, Artificial Sequence
  RPE65 RNA guide
uguggcaaguggaguguagug

SEQ ID NO: 44937 - RNA, 21 nt, Artificial Sequence
  RPE65 RNA guide
ugugucaauagcccuguacag

SEQ ID NO: 44938 - RNA, 21 nt, Artificial Sequence
  RPE65 RNA guide
uguguuucuuugccuguauaa

SEQ ID NO: 44939 - RNA, 21 nt, Artificial Sequence
  RPE65 RNA guide
uguugcaaaaggcauuuugac

SEQ ID NO: 44940 - RNA, 21 nt, Artificial Sequence
  RPE65 RNA guide
uguuucuuugccuguauaagc

SEQ ID NO: 44941 - RNA, 21 nt, Artificial Sequence
  RPE65 RNA guide
uuaaaacccaccuccagcuau

SEQ ID NO: 44942 - RNA, 21 nt, Artificial Sequence
  RPE65 RNA guide
uuaagaugcccaaaggauaua

SEQ ID NO: 44943 - RNA, 21 nt, Artificial Sequence
  RPE65 RNA guide
uuaagauguugcaaaaggcau

SEQ ID NO: 44944 - RNA, 21 nt, Artificial Sequence
  RPE65 RNA guide
uuaagucaggggaguagggaa

SEQ ID NO: 44945 - RNA, 21 nt, Artificial Sequence
  RPE65 RNA guide
uuacucacuaguaagugaaug

SEQ ID NO: 44946 - RNA, 21 nt, Artificial Sequence
  RPE65 RNA guide
uuacuguacagggcuauugac

SEQ ID NO: 44947 - RNA, 21 nt, Artificial Sequence
  RPE65 RNA guide
uuagaacagcuuauacaggca

SEQ ID NO: 44948 - RNA, 21 nt, Artificial Sequence
  RPE65 RNA guide
uuagagggguuauuuucauuu

SEQ ID NO: 44949 - RNA, 21 nt, Artificial Sequence
  RPE65 RNA guide
uuagauggguuugugucaaua

SEQ ID NO: 44950 - RNA, 21 nt, Artificial Sequence
  RPE65 RNA guide
uuagugaaauuucaugugaag

SEQ ID NO: 44951 - RNA, 21 nt, Artificial Sequence
  RPE65 RNA guide
uuagugugcaucagaaucaca

SEQ ID NO: 44952 - RNA, 21 nt, Artificial Sequence
  RPE65 RNA guide
uuaugugauucugaugcacac

SEQ ID NO: 44953 - RNA, 21 nt, Artificial Sequence
  RPE65 RNA guide
uucacuaagaagugcaaauga

SEQ ID NO: 44954 - RNA, 21 nt, Artificial Sequence
  RPE65 RNA guide
uucaugugaagcugcaaaauc

SEQ ID NO: 44955 - RNA, 21 nt, Artificial Sequence
  RPE65 RNA guide
uucauuuucuccaucauuugc

SEQ ID NO: 44956 - RNA, 21 nt, Artificial Sequence
  RPE65 RNA guide
uuccaaagccuuuuaaaacca

SEQ ID NO: 44957 - RNA, 21 nt, Artificial Sequence
  RPE65 RNA guide
uuccaaaucugcugcuauuug

SEQ ID NO: 44958 - RNA, 21 nt, Artificial Sequence
  RPE65 RNA guide
uucccuacuccccugacuuaa

SEQ ID NO: 44959 - RNA, 21 nt, Artificial Sequence
  RPE65 RNA guide
uuccugggugauuuugcagcu

SEQ ID NO: 44960 - RNA, 21 nt, Artificial Sequence
  RPE65 RNA guide
uucuccaucauuugcacuucu

SEQ ID NO: 44961 - RNA, 21 nt, Artificial Sequence
  RPE65 RNA guide
uucugagguuucuucccuacu

SEQ ID NO: 44962 - RNA, 21 nt, Artificial Sequence
  RPE65 RNA guide
uucugaugcacacuaaaguuu

SEQ ID NO: 44963 - RNA, 21 nt, Artificial Sequence
  RPE65 RNA guide
uucuuagugaaauuucaugug

SEQ ID NO: 44964 - RNA, 21 nt, Artificial Sequence
  RPE65 RNA guide
uucuucccuacuccccugacu

SEQ ID NO: 44965 - RNA, 21 nt, Artificial Sequence
  RPE65 RNA guide
uucuuugccuguauaagcugu

SEQ ID NO: 44966 - RNA, 21 nt, Artificial Sequence
  RPE65 RNA guide
uugacacaaacccaucuaaac

SEQ ID NO: 44967 - RNA, 21 nt, Artificial Sequence
  RPE65 RNA guide
uugaccauucugagguuucuu

SEQ ID NO: 44968 - RNA, 21 nt, Artificial Sequence
  RPE65 RNA guide
uugaggaccauucacuuacua

SEQ ID NO: 44969 - RNA, 21 nt, Artificial Sequence
  RPE65 RNA guide
uugagugcacguuuccaaauc

SEQ ID NO: 44970 - RNA, 21 nt, Artificial Sequence
  RPE65 RNA guide
uugcaaaaggcauuuugacca

SEQ ID NO: 44971 - RNA, 21 nt, Artificial Sequence
  RPE65 RNA guide
uugcaacaucuuaagaugccc

SEQ ID NO: 44972 - RNA, 21 nt, Artificial Sequence
  RPE65 RNA guide
uugcaagaugugacuccacua

SEQ ID NO: 44973 - RNA, 21 nt, Artificial Sequence
  RPE65 RNA guide
uugcaauagcuggaggugggu

SEQ ID NO: 44974 - RNA, 21 nt, Artificial Sequence
  RPE65 RNA guide
uugcacuucuuagugaaauuu

SEQ ID NO: 44975 - RNA, 21 nt, Artificial Sequence
  RPE65 RNA guide
uugcagcuucacaugaaauuu

SEQ ID NO: 44976 - RNA, 21 nt, Artificial Sequence
  RPE65 RNA guide
uugccacaacccuauuugagu

SEQ ID NO: 44977 - RNA, 21 nt, Artificial Sequence
  RPE65 RNA guide
uugccuguauaagcuguucua

SEQ ID NO: 44978 - RNA, 21 nt, Artificial Sequence
  RPE65 RNA guide
uuggaaacgugcacucaaaua

SEQ ID NO: 44979 - RNA, 21 nt, Artificial Sequence
  RPE65 RNA guide
uuggauuuuccugggugauuu

SEQ ID NO: 44980 - RNA, 21 nt, Artificial Sequence
  RPE65 RNA guide
uugggcaucuuaagauguugc

SEQ ID NO: 44981 - RNA, 21 nt, Artificial Sequence
  RPE65 RNA guide
uuguggcaaguggaguguagu

SEQ ID NO: 44982 - RNA, 21 nt, Artificial Sequence
  RPE65 RNA guide
uugugucaauagcccuguaca

SEQ ID NO: 44983 - RNA, 21 nt, Artificial Sequence
  RPE65 RNA guide
uuuaagucaggggaguaggga

SEQ ID NO: 44984 - RNA, 21 nt, Artificial Sequence
  RPE65 RNA guide
uuuacucacuaguaagugaau

SEQ ID NO: 44985 - RNA, 21 nt, Artificial Sequence
  RPE65 RNA guide
uuuagaacagcuuauacaggc

SEQ ID NO: 44986 - RNA, 21 nt, Artificial Sequence
  RPE65 RNA guide
uuuagauggguuugugucaau

SEQ ID NO: 44987 - RNA, 21 nt, Artificial Sequence
  RPE65 RNA guide
uuuagugugcaucagaaucac

SEQ ID NO: 44988 - RNA, 21 nt, Artificial Sequence
  RPE65 RNA guide
uuuaugugauucugaugcaca

SEQ ID NO: 44989 - RNA, 21 nt, Artificial Sequence
  RPE65 RNA guide
uuucacuaagaagugcaaaug

SEQ ID NO: 44990 - RNA, 21 nt, Artificial Sequence
  RPE65 RNA guide
uuucaugugaagcugcaaaau

SEQ ID NO: 44991 - RNA, 21 nt, Artificial Sequence
  RPE65 RNA guide
uuucauuuucuccaucauuug

SEQ ID NO: 44992 - RNA, 21 nt, Artificial Sequence
  RPE65 RNA guide
uuuccaaaucugcugcuauuu

SEQ ID NO: 44993 - RNA, 21 nt, Artificial Sequence
  RPE65 RNA guide
uuuccugggugauuuugcagc

SEQ ID NO: 44994 - RNA, 21 nt, Artificial Sequence
  RPE65 RNA guide
uuucuccaucauuugcacuuc

SEQ ID NO: 44995 - RNA, 21 nt, Artificial Sequence
  RPE65 RNA guide
uuucuucccuacuccccugac

SEQ ID NO: 44996 - RNA, 21 nt, Artificial Sequence
  RPE65 RNA guide
uuucuuugccuguauaagcug

SEQ ID NO: 44997 - RNA, 21 nt, Artificial Sequence
  RPE65 RNA guide
uuugaccauucugagguuucu

SEQ ID NO: 44998 - RNA, 21 nt, Artificial Sequence
  RPE65 RNA guide
uuugaggaccauucacuuacu

SEQ ID NO: 44999 - RNA, 21 nt, Artificial Sequence
  RPE65 RNA guide
uuugagugcacguuuccaaau

SEQ ID NO: 45000 - RNA, 21 nt, Artificial Sequence
  RPE65 RNA guide
uuugcaacaucuuaagaugcc

SEQ ID NO: 45001 - RNA, 21 nt, Artificial Sequence
  RPE65 RNA guide
uuugcagcuucacaugaaauu

SEQ ID NO: 45002 - RNA, 21 nt, Artificial Sequence
  RPE65 RNA guide
uuugccuguauaagcuguucu

SEQ ID NO: 45003 - RNA, 21 nt, Artificial Sequence
  RPE65 RNA guide
uuuggaaacgugcacucaaau

SEQ ID NO: 45004 - RNA, 21 nt, Artificial Sequence
  RPE65 RNA guide
uuuggauuuuccugggugauu

SEQ ID NO: 45005 - RNA, 21 nt, Artificial Sequence
  RPE65 RNA guide
uuugggcaucuuaagauguug

SEQ ID NO: 45006 - RNA, 21 nt, Artificial Sequence
  RPE65 RNA guide
uuugugucaauagcccuguac

SEQ ID NO: 45007 - RNA, 21 nt, Artificial Sequence
  RPE65 RNA guide
uuuuaagucaggggaguaggg

SEQ ID NO: 45008 - RNA, 21 nt, Artificial Sequence
  RPE65 RNA guide
uuuucauuuucuccaucauuu

SEQ ID NO: 45009 - RNA, 21 nt, Artificial Sequence
  RPE65 RNA guide
uuuuccugggugauuuugcag

SEQ ID NO: 45010 - RNA, 21 nt, Artificial Sequence
  RPE65 RNA guide
uuuucuccaucauuugcacuu

SEQ ID NO: 45011 - RNA, 21 nt, Artificial Sequence
  RPE65 RNA guide
uuuugaccauucugagguuuc

SEQ ID NO: 45012 - RNA, 21 nt, Artificial Sequence
  RPE65 RNA guide
uuuugcaacaucuuaagaugc

SEQ ID NO: 45013 - RNA, 21 nt, Artificial Sequence
  RPE65 RNA guide
uuuugcagcuucacaugaaau

SEQ ID NO: 45014 - RNA, 22 nt, Artificial Sequence
  RPE65 RNA guide
aaaacccaccuccagcuauugc

SEQ ID NO: 45015 - RNA, 22 nt, Artificial Sequence
  RPE65 RNA guide
aaaaggcauuuugaccauucug

SEQ ID NO: 45016 - RNA, 22 nt, Artificial Sequence
  RPE65 RNA guide
aaaaucacccaggaaaauccaa

SEQ ID NO: 45017 - RNA, 22 nt, Artificial Sequence
  RPE65 RNA guide
aaaauccaaauagcagcagauu

SEQ ID NO: 45018 - RNA, 22 nt, Artificial Sequence
  RPE65 RNA guide
aaaaugccuuuugcaacaucuu

SEQ ID NO: 45019 - RNA, 22 nt, Artificial Sequence
  RPE65 RNA guide
aaaauguguuucuuugccugua

SEQ ID NO: 45020 - RNA, 22 nt, Artificial Sequence
  RPE65 RNA guide
aaacaaucaaaauguguuucuu

SEQ ID NO: 45021 - RNA, 22 nt, Artificial Sequence
  RPE65 RNA guide
aaacacauuuugauuguuuuag

SEQ ID NO: 45022 - RNA, 22 nt, Artificial Sequence
  RPE65 RNA guide
aaacccaccuccagcuauugca

SEQ ID NO: 45023 - RNA, 22 nt, Artificial Sequence
  RPE65 RNA guide
aaacccaucuaaacuauauccu

SEQ ID NO: 45024 - RNA, 22 nt, Artificial Sequence
  RPE65 RNA guide
aaaccucagaauggucaaaaug

SEQ ID NO: 45025 - RNA, 22 nt, Artificial Sequence
  RPE65 RNA guide
aaacgugcacucaaauaggguu

SEQ ID NO: 45026 - RNA, 22 nt, Artificial Sequence
  RPE65 RNA guide
aaacuauauccuuugggcaucu

SEQ ID NO: 45027 - RNA, 22 nt, Artificial Sequence
  RPE65 RNA guide
aaacucuuuaugugauucugau

SEQ ID NO: 45028 - RNA, 22 nt, Artificial Sequence
  RPE65 RNA guide
aaacuuuagugugcaucagaau

SEQ ID NO: 45029 - RNA, 22 nt, Artificial Sequence
  RPE65 RNA guide
aaagcauuuagaacagcuuaua

SEQ ID NO: 45030 - RNA, 22 nt, Artificial Sequence
  RPE65 RNA guide
aaaggauauaguuuagaugggu

SEQ ID NO: 45031 - RNA, 22 nt, Artificial Sequence
  RPE65 RNA guide
aaaggcauuuugaccauucuga

SEQ ID NO: 45032 - RNA, 22 nt, Artificial Sequence
  RPE65 RNA guide
aaaguuugaggaccauucacuu

SEQ ID NO: 45033 - RNA, 22 nt, Artificial Sequence
  RPE65 RNA guide
aaauagcagcagauuuggaaac

SEQ ID NO: 45034 - RNA, 22 nt, Artificial Sequence
  RPE65 RNA guide
aaauaggguuguggcaagugga

SEQ ID NO: 45035 - RNA, 22 nt, Artificial Sequence
  RPE65 RNA guide
aaaucacccaggaaaauccaaa

SEQ ID NO: 45036 - RNA, 22 nt, Artificial Sequence
  RPE65 RNA guide
aaauccaaauagcagcagauuu

SEQ ID NO: 45037 - RNA, 22 nt, Artificial Sequence
  RPE65 RNA guide
aaaucugcugcuauuuggauuu

SEQ ID NO: 45038 - RNA, 22 nt, Artificial Sequence
  RPE65 RNA guide
aaaugccuuuugcaacaucuua

SEQ ID NO: 45039 - RNA, 22 nt, Artificial Sequence
  RPE65 RNA guide
aaauguguuucuuugccuguau

SEQ ID NO: 45040 - RNA, 22 nt, Artificial Sequence
  RPE65 RNA guide
aaauuuacucacuaguaaguga

SEQ ID NO: 45041 - RNA, 22 nt, Artificial Sequence
  RPE65 RNA guide
aaauuucaugugaagcugcaaa

SEQ ID NO: 45042 - RNA, 22 nt, Artificial Sequence
  RPE65 RNA guide
aacaaucaaaauguguuucuuu

SEQ ID NO: 45043 - RNA, 22 nt, Artificial Sequence
  RPE65 RNA guide
aacacauuuugauuguuuuaga

SEQ ID NO: 45044 - RNA, 22 nt, Artificial Sequence
  RPE65 RNA guide
aacagcuuauacaggcaaagaa

SEQ ID NO: 45045 - RNA, 22 nt, Artificial Sequence
  RPE65 RNA guide
aacaucuuaagaugcccaaagg

SEQ ID NO: 45046 - RNA, 22 nt, Artificial Sequence
  RPE65 RNA guide
aacccaccuccagcuauugcaa

SEQ ID NO: 45047 - RNA, 22 nt, Artificial Sequence
  RPE65 RNA guide
aacccaucuaaacuauauccuu

SEQ ID NO: 45048 - RNA, 22 nt, Artificial Sequence
  RPE65 RNA guide
aaccccucuaaaacaaucaaaa

SEQ ID NO: 45049 - RNA, 22 nt, Artificial Sequence
  RPE65 RNA guide
aacccuauuugagugcacguuu

SEQ ID NO: 45050 - RNA, 22 nt, Artificial Sequence
  RPE65 RNA guide
aaccucagaauggucaaaaugc

SEQ ID NO: 45051 - RNA, 22 nt, Artificial Sequence
  RPE65 RNA guide
aacgugcacucaaauaggguug

SEQ ID NO: 45052 - RNA, 22 nt, Artificial Sequence
  RPE65 RNA guide
aacuauauccuuugggcaucuu

SEQ ID NO: 45053 - RNA, 22 nt, Artificial Sequence
  RPE65 RNA guide
aacucuuuaugugauucugaug

SEQ ID NO: 45054 - RNA, 22 nt, Artificial Sequence
  RPE65 RNA guide
aacuuuagugugcaucagaauc

SEQ ID NO: 45055 - RNA, 22 nt, Artificial Sequence
  RPE65 RNA guide
aagaaaccucagaauggucaaa

SEQ ID NO: 45056 - RNA, 22 nt, Artificial Sequence
  RPE65 RNA guide
aagaaacucuuuaugugauucu

SEQ ID NO: 45057 - RNA, 22 nt, Artificial Sequence
  RPE65 RNA guide
aagaagugcaaaugauggagaa

SEQ ID NO: 45058 - RNA, 22 nt, Artificial Sequence
  RPE65 RNA guide
aagaauuacuguacagggcuau

SEQ ID NO: 45059 - RNA, 22 nt, Artificial Sequence
  RPE65 RNA guide
aagaugcccaaaggauauaguu

SEQ ID NO: 45060 - RNA, 22 nt, Artificial Sequence
  RPE65 RNA guide
aagaugugacuccacuacacuc

SEQ ID NO: 45061 - RNA, 22 nt, Artificial Sequence
  RPE65 RNA guide
aagauguugcaaaaggcauuuu

SEQ ID NO: 45062 - RNA, 22 nt, Artificial Sequence
  RPE65 RNA guide
aagcauuuagaacagcuuauac

SEQ ID NO: 45063 - RNA, 22 nt, Artificial Sequence
  RPE65 RNA guide
aagcugcaaaaucacccaggaa

SEQ ID NO: 45064 - RNA, 22 nt, Artificial Sequence
  RPE65 RNA guide
aaggauauaguuuagauggguu

SEQ ID NO: 45065 - RNA, 22 nt, Artificial Sequence
  RPE65 RNA guide
aaggcauuuugaccauucugag

SEQ ID NO: 45066 - RNA, 22 nt, Artificial Sequence
  RPE65 RNA guide
aagucaggggaguagggaagaa

SEQ ID NO: 45067 - RNA, 22 nt, Artificial Sequence
  RPE65 RNA guide
aagugaaugguccucaaacuuu

SEQ ID NO: 45068 - RNA, 22 nt, Artificial Sequence
  RPE65 RNA guide
aagugcaaaugauggagaaaau

SEQ ID NO: 45069 - RNA, 22 nt, Artificial Sequence
  RPE65 RNA guide
aaguggaguguaguggagucac

SEQ ID NO: 45070 - RNA, 22 nt, Artificial Sequence
  RPE65 RNA guide
aaguuugaggaccauucacuua

SEQ ID NO: 45071 - RNA, 22 nt, Artificial Sequence
  RPE65 RNA guide
aauaaagugguuuuaaaaggcu

SEQ ID NO: 45072 - RNA, 22 nt, Artificial Sequence
  RPE65 RNA guide
aauagcagcagauuuggaaacg

SEQ ID NO: 45073 - RNA, 22 nt, Artificial Sequence
  RPE65 RNA guide
aauagcccuguacaguaauucu

SEQ ID NO: 45074 - RNA, 22 nt, Artificial Sequence
  RPE65 RNA guide
aauagcuggagguggguuuuaa

SEQ ID NO: 45075 - RNA, 22 nt, Artificial Sequence
  RPE65 RNA guide
aauaggguuguggcaaguggag

SEQ ID NO: 45076 - RNA, 22 nt, Artificial Sequence
  RPE65 RNA guide
aaucaaaauguguuucuuugcc

SEQ ID NO: 45077 - RNA, 22 nt, Artificial Sequence
  RPE65 RNA guide
aaucacccaggaaaauccaaau

SEQ ID NO: 45078 - RNA, 22 nt, Artificial Sequence
  RPE65 RNA guide
aauccaaauagcagcagauuug

SEQ ID NO: 45079 - RNA, 22 nt, Artificial Sequence
  RPE65 RNA guide
aaucugcugcuauuuggauuuu

SEQ ID NO: 45080 - RNA, 22 nt, Artificial Sequence
  RPE65 RNA guide
aaugauggagaaaaugaaaaua

SEQ ID NO: 45081 - RNA, 22 nt, Artificial Sequence
  RPE65 RNA guide
aaugccuuuugcaacaucuuaa

SEQ ID NO: 45082 - RNA, 22 nt, Artificial Sequence
  RPE65 RNA guide
aauggucaaaaugccuuuugca

SEQ ID NO: 45083 - RNA, 22 nt, Artificial Sequence
  RPE65 RNA guide
aaugguccucaaacuuuagugu

SEQ ID NO: 45084 - RNA, 22 nt, Artificial Sequence
  RPE65 RNA guide
aaugugcauaagaauuacugua

SEQ ID NO: 45085 - RNA, 22 nt, Artificial Sequence
  RPE65 RNA guide
aauguguuucuuugccuguaua

SEQ ID NO: 45086 - RNA, 22 nt, Artificial Sequence
  RPE65 RNA guide
aauuacuguacagggcuauuga

SEQ ID NO: 45087 - RNA, 22 nt, Artificial Sequence
  RPE65 RNA guide
aauuuacucacuaguaagugaa

SEQ ID NO: 45088 - RNA, 22 nt, Artificial Sequence
  RPE65 RNA guide
aauuucacuaagaagugcaaau

SEQ ID NO: 45089 - RNA, 22 nt, Artificial Sequence
  RPE65 RNA guide
aauuucaugugaagcugcaaaa

SEQ ID NO: 45090 - RNA, 22 nt, Artificial Sequence
  RPE65 RNA guide
acaaacccaucuaaacuauauc

SEQ ID NO: 45091 - RNA, 22 nt, Artificial Sequence
  RPE65 RNA guide
acaaagcauuuagaacagcuua

SEQ ID NO: 45092 - RNA, 22 nt, Artificial Sequence
  RPE65 RNA guide
acaacccuauuugagugcacgu

SEQ ID NO: 45093 - RNA, 22 nt, Artificial Sequence
  RPE65 RNA guide
acaaucaaaauguguuucuuug

SEQ ID NO: 45094 - RNA, 22 nt, Artificial Sequence
  RPE65 RNA guide
acacaaacccaucuaaacuaua

SEQ ID NO: 45095 - RNA, 22 nt, Artificial Sequence
  RPE65 RNA guide
acacauuuugauuguuuuagag

SEQ ID NO: 45096 - RNA, 22 nt, Artificial Sequence
  RPE65 RNA guide
acacuaaaguuugaggaccauu

SEQ ID NO: 45097 - RNA, 22 nt, Artificial Sequence
  RPE65 RNA guide
acacuccacuugccacaacccu

SEQ ID NO: 45098 - RNA, 22 nt, Artificial Sequence
  RPE65 RNA guide
acagcuuauacaggcaaagaaa

SEQ ID NO: 45099 - RNA, 22 nt, Artificial Sequence
  RPE65 RNA guide
acaggcaaagaaacacauuuug

SEQ ID NO: 45100 - RNA, 22 nt, Artificial Sequence
  RPE65 RNA guide
acagggcuauugacacaaaccc

SEQ ID NO: 45101 - RNA, 22 nt, Artificial Sequence
  RPE65 RNA guide
acaucuuaagaugcccaaagga

SEQ ID NO: 45102 - RNA, 22 nt, Artificial Sequence
  RPE65 RNA guide
acaucuugcaauagcuggaggu

SEQ ID NO: 45103 - RNA, 22 nt, Artificial Sequence
  RPE65 RNA guide
acaugaaauuucacuaagaagu

SEQ ID NO: 45104 - RNA, 22 nt, Artificial Sequence
  RPE65 RNA guide
acauuuugauuguuuuagaggg

SEQ ID NO: 45105 - RNA, 22 nt, Artificial Sequence
  RPE65 RNA guide
accauucacuuacuagugagua

SEQ ID NO: 45106 - RNA, 22 nt, Artificial Sequence
  RPE65 RNA guide
accauucugagguuucuucccu

SEQ ID NO: 45107 - RNA, 22 nt, Artificial Sequence
  RPE65 RNA guide
acccaccuccagcuauugcaag

SEQ ID NO: 45108 - RNA, 22 nt, Artificial Sequence
  RPE65 RNA guide
acccaggaaaauccaaauagca

SEQ ID NO: 45109 - RNA, 22 nt, Artificial Sequence
  RPE65 RNA guide
acccaucuaaacuauauccuuu

SEQ ID NO: 45110 - RNA, 22 nt, Artificial Sequence
  RPE65 RNA guide
accccucuaaaacaaucaaaau

SEQ ID NO: 45111 - RNA, 22 nt, Artificial Sequence
  RPE65 RNA guide
acccuauuugagugcacguuuc

SEQ ID NO: 45112 - RNA, 22 nt, Artificial Sequence
  RPE65 RNA guide
accucagaauggucaaaaugcc

SEQ ID NO: 45113 - RNA, 22 nt, Artificial Sequence
  RPE65 RNA guide
accuccagcuauugcaagaugu

SEQ ID NO: 45114 - RNA, 22 nt, Artificial Sequence
  RPE65 RNA guide
acgugcacucaaauaggguugu

SEQ ID NO: 45115 - RNA, 22 nt, Artificial Sequence
  RPE65 RNA guide
acguuuccaaaucugcugcuau

SEQ ID NO: 45116 - RNA, 22 nt, Artificial Sequence
  RPE65 RNA guide
acuaaaguuugaggaccauuca

SEQ ID NO: 45117 - RNA, 22 nt, Artificial Sequence
  RPE65 RNA guide
acuaagaagugcaaaugaugga

SEQ ID NO: 45118 - RNA, 22 nt, Artificial Sequence
  RPE65 RNA guide
acuacacuccacuugccacaac

SEQ ID NO: 45119 - RNA, 22 nt, Artificial Sequence
  RPE65 RNA guide
acuaguaagugaaugguccuca

SEQ ID NO: 45120 - RNA, 22 nt, Artificial Sequence
  RPE65 RNA guide
acuauauccuuugggcaucuua

SEQ ID NO: 45121 - RNA, 22 nt, Artificial Sequence
  RPE65 RNA guide
acucaaauaggguuguggcaag

SEQ ID NO: 45122 - RNA, 22 nt, Artificial Sequence
  RPE65 RNA guide
acucacuaguaagugaaugguc

SEQ ID NO: 45123 - RNA, 22 nt, Artificial Sequence
  RPE65 RNA guide
acuccacuacacuccacuugcc

SEQ ID NO: 45124 - RNA, 22 nt, Artificial Sequence
  RPE65 RNA guide
acuccacuugccacaacccuau

SEQ ID NO: 45125 - RNA, 22 nt, Artificial Sequence
  RPE65 RNA guide
acuccccugacuuaaaacccac

SEQ ID NO: 45126 - RNA, 22 nt, Artificial Sequence
  RPE65 RNA guide
acucuuuaugugauucugaugc

SEQ ID NO: 45127 - RNA, 22 nt, Artificial Sequence
  RPE65 RNA guide
acuguacagggcuauugacaca

SEQ ID NO: 45128 - RNA, 22 nt, Artificial Sequence
  RPE65 RNA guide
acuuaaaacccaccuccagcua

SEQ ID NO: 45129 - RNA, 22 nt, Artificial Sequence
  RPE65 RNA guide
acuucuuagugaaauuucaugu

SEQ ID NO: 45130 - RNA, 22 nt, Artificial Sequence
  RPE65 RNA guide
acuugccacaacccuauuugag

SEQ ID NO: 45131 - RNA, 22 nt, Artificial Sequence
  RPE65 RNA guide
acuuuagugugcaucagaauca

SEQ ID NO: 45132 - RNA, 22 nt, Artificial Sequence
  RPE65 RNA guide
agaaaccucagaauggucaaaa

SEQ ID NO: 45133 - RNA, 22 nt, Artificial Sequence
  RPE65 RNA guide
agaaacucuuuaugugauucug

SEQ ID NO: 45134 - RNA, 22 nt, Artificial Sequence
  RPE65 RNA guide
agaacagcuuauacaggcaaag

SEQ ID NO: 45135 - RNA, 22 nt, Artificial Sequence
  RPE65 RNA guide
agaagugcaaaugauggagaaa

SEQ ID NO: 45136 - RNA, 22 nt, Artificial Sequence
  RPE65 RNA guide
agaauggucaaaaugccuuuug

SEQ ID NO: 45137 - RNA, 22 nt, Artificial Sequence
  RPE65 RNA guide
agaauuacuguacagggcuauu

SEQ ID NO: 45138 - RNA, 22 nt, Artificial Sequence
  RPE65 RNA guide
agagggguuauuuucauuuucu

SEQ ID NO: 45139 - RNA, 22 nt, Artificial Sequence
  RPE65 RNA guide
agaguuucuuaaaauacugauu

SEQ ID NO: 45140 - RNA, 22 nt, Artificial Sequence
  RPE65 RNA guide
agaugcccaaaggauauaguuu

SEQ ID NO: 45141 - RNA, 22 nt, Artificial Sequence
  RPE65 RNA guide
agauggguuugugucaauagcc

SEQ ID NO: 45142 - RNA, 22 nt, Artificial Sequence
  RPE65 RNA guide
agaugugacuccacuacacucc

SEQ ID NO: 45143 - RNA, 22 nt, Artificial Sequence
  RPE65 RNA guide
agauguugcaaaaggcauuuug

SEQ ID NO: 45144 - RNA, 22 nt, Artificial Sequence
  RPE65 RNA guide
agauuuggaaacgugcacucaa

SEQ ID NO: 45145 - RNA, 22 nt, Artificial Sequence
  RPE65 RNA guide
agcagauuuggaaacgugcacu

SEQ ID NO: 45146 - RNA, 22 nt, Artificial Sequence
  RPE65 RNA guide
agcagcagauuuggaaacgugc

SEQ ID NO: 45147 - RNA, 22 nt, Artificial Sequence
  RPE65 RNA guide
agcauuuagaacagcuuauaca

SEQ ID NO: 45148 - RNA, 22 nt, Artificial Sequence
  RPE65 RNA guide
agcccuguacaguaauucuuau

SEQ ID NO: 45149 - RNA, 22 nt, Artificial Sequence
  RPE65 RNA guide
agccuuuuaaaaccacuuuauu

SEQ ID NO: 45150 - RNA, 22 nt, Artificial Sequence
  RPE65 RNA guide
agcuauugcaagaugugacucc

SEQ ID NO: 45151 - RNA, 22 nt, Artificial Sequence
  RPE65 RNA guide
agcugcaaaaucacccaggaaa

SEQ ID NO: 45152 - RNA, 22 nt, Artificial Sequence
  RPE65 RNA guide
agcuggagguggguuuuaaguc

SEQ ID NO: 45153 - RNA, 22 nt, Artificial Sequence
  RPE65 RNA guide
agcuuauacaggcaaagaaaca

SEQ ID NO: 45154 - RNA, 22 nt, Artificial Sequence
  RPE65 RNA guide
agcuucacaugaaauuucacua

SEQ ID NO: 45155 - RNA, 22 nt, Artificial Sequence
  RPE65 RNA guide
aggaaaauccaaauagcagcag

SEQ ID NO: 45156 - RNA, 22 nt, Artificial Sequence
  RPE65 RNA guide
aggaccauucacuuacuaguga

SEQ ID NO: 45157 - RNA, 22 nt, Artificial Sequence
  RPE65 RNA guide
aggauauaguuuagauggguuu

SEQ ID NO: 45158 - RNA, 22 nt, Artificial Sequence
  RPE65 RNA guide
aggcaaagaaacacauuuugau

SEQ ID NO: 45159 - RNA, 22 nt, Artificial Sequence
  RPE65 RNA guide
aggcauuuugaccauucugagg

SEQ ID NO: 45160 - RNA, 22 nt, Artificial Sequence
  RPE65 RNA guide
agggaagaaaccucagaauggu

SEQ ID NO: 45161 - RNA, 22 nt, Artificial Sequence
  RPE65 RNA guide
agggcuauugacacaaacccau

SEQ ID NO: 45162 - RNA, 22 nt, Artificial Sequence
  RPE65 RNA guide
aggggaguagggaagaaaccuc

SEQ ID NO: 45163 - RNA, 22 nt, Artificial Sequence
  RPE65 RNA guide
agggguuauuuucauuuucucc

SEQ ID NO: 45164 - RNA, 22 nt, Artificial Sequence
  RPE65 RNA guide
aggguuguggcaaguggagugu

SEQ ID NO: 45165 - RNA, 22 nt, Artificial Sequence
  RPE65 RNA guide
agguggguuuuaagucagggga

SEQ ID NO: 45166 - RNA, 22 nt, Artificial Sequence
  RPE65 RNA guide
agguuucuucccuacuccccug

SEQ ID NO: 45167 - RNA, 22 nt, Artificial Sequence
  RPE65 RNA guide
aguaagugaaugguccucaaac

SEQ ID NO: 45168 - RNA, 22 nt, Artificial Sequence
  RPE65 RNA guide
aguagggaagaaaccucagaau

SEQ ID NO: 45169 - RNA, 22 nt, Artificial Sequence
  RPE65 RNA guide
agucacaucuugcaauagcugg

SEQ ID NO: 45170 - RNA, 22 nt, Artificial Sequence
  RPE65 RNA guide
agucaggggaguagggaagaaa

SEQ ID NO: 45171 - RNA, 22 nt, Artificial Sequence
  RPE65 RNA guide
agugaaauuucaugugaagcug

SEQ ID NO: 45172 - RNA, 22 nt, Artificial Sequence
  RPE65 RNA guide
agugaaugguccucaaacuuua

SEQ ID NO: 45173 - RNA, 22 nt, Artificial Sequence
  RPE65 RNA guide
agugcaaaugauggagaaaaug

SEQ ID NO: 45174 - RNA, 22 nt, Artificial Sequence
  RPE65 RNA guide
agugcacguuuccaaaucugcu

SEQ ID NO: 45175 - RNA, 22 nt, Artificial Sequence
  RPE65 RNA guide
aguggagucacaucuugcaaua

SEQ ID NO: 45176 - RNA, 22 nt, Artificial Sequence
  RPE65 RNA guide
aguggaguguaguggagucaca

SEQ ID NO: 45177 - RNA, 22 nt, Artificial Sequence
  RPE65 RNA guide
aguguaguggagucacaucuug

SEQ ID NO: 45178 - RNA, 22 nt, Artificial Sequence
  RPE65 RNA guide
agugugcaucagaaucacauaa

SEQ ID NO: 45179 - RNA, 22 nt, Artificial Sequence
  RPE65 RNA guide
aguuuagauggguuugugucaa

SEQ ID NO: 45180 - RNA, 22 nt, Artificial Sequence
  RPE65 RNA guide
aguuugaggaccauucacuuac

SEQ ID NO: 45181 - RNA, 22 nt, Artificial Sequence
  RPE65 RNA guide
auaaagugguuuuaaaaggcuu

SEQ ID NO: 45182 - RNA, 22 nt, Artificial Sequence
  RPE65 RNA guide
auaaccccucuaaaacaaucaa

SEQ ID NO: 45183 - RNA, 22 nt, Artificial Sequence
  RPE65 RNA guide
auaagaauuacuguacagggcu

SEQ ID NO: 45184 - RNA, 22 nt, Artificial Sequence
  RPE65 RNA guide
auacaggcaaagaaacacauuu

SEQ ID NO: 45185 - RNA, 22 nt, Artificial Sequence
  RPE65 RNA guide
auagcagcagauuuggaaacgu

SEQ ID NO: 45186 - RNA, 22 nt, Artificial Sequence
  RPE65 RNA guide
auagcccuguacaguaauucuu

SEQ ID NO: 45187 - RNA, 22 nt, Artificial Sequence
  RPE65 RNA guide
auagcuggagguggguuuuaag

SEQ ID NO: 45188 - RNA, 22 nt, Artificial Sequence
  RPE65 RNA guide
auaggguuguggcaaguggagu

SEQ ID NO: 45189 - RNA, 22 nt, Artificial Sequence
  RPE65 RNA guide
auaguuuagauggguuuguguc

SEQ ID NO: 45190 - RNA, 22 nt, Artificial Sequence
  RPE65 RNA guide
auauaguuuagauggguuugug

SEQ ID NO: 45191 - RNA, 22 nt, Artificial Sequence
  RPE65 RNA guide
auauccuuugggcaucuuaaga

SEQ ID NO: 45192 - RNA, 22 nt, Artificial Sequence
  RPE65 RNA guide
aucaaaauguguuucuuugccu

SEQ ID NO: 45193 - RNA, 22 nt, Artificial Sequence
  RPE65 RNA guide
aucacccaggaaaauccaaaua

SEQ ID NO: 45194 - RNA, 22 nt, Artificial Sequence
  RPE65 RNA guide
auccaaauagcagcagauuugg

SEQ ID NO: 45195 - RNA, 22 nt, Artificial Sequence
  RPE65 RNA guide
auccuuugggcaucuuaagaug

SEQ ID NO: 45196 - RNA, 22 nt, Artificial Sequence
  RPE65 RNA guide
aucuaaacuauauccuuugggc

SEQ ID NO: 45197 - RNA, 22 nt, Artificial Sequence
  RPE65 RNA guide
aucugcugcuauuuggauuuuc

SEQ ID NO: 45198 - RNA, 22 nt, Artificial Sequence
  RPE65 RNA guide
aucuuaagaugcccaaaggaua

SEQ ID NO: 45199 - RNA, 22 nt, Artificial Sequence
  RPE65 RNA guide
aucuuaagauguugcaaaaggc

SEQ ID NO: 45200 - RNA, 22 nt, Artificial Sequence
  RPE65 RNA guide
aucuugcaauagcuggaggugg

SEQ ID NO: 45201 - RNA, 22 nt, Artificial Sequence
  RPE65 RNA guide
augaaaauaaccccucuaaaac

SEQ ID NO: 45202 - RNA, 22 nt, Artificial Sequence
  RPE65 RNA guide
augauggagaaaaugaaaauaa

SEQ ID NO: 45203 - RNA, 22 nt, Artificial Sequence
  RPE65 RNA guide
augcacacuaaaguuugaggac

SEQ ID NO: 45204 - RNA, 22 nt, Artificial Sequence
  RPE65 RNA guide
augcccaaaggauauaguuuag

SEQ ID NO: 45205 - RNA, 22 nt, Artificial Sequence
  RPE65 RNA guide
augccuuuugcaacaucuuaag

SEQ ID NO: 45206 - RNA, 22 nt, Artificial Sequence
  RPE65 RNA guide
auggagaaaaugaaaauaaccc

SEQ ID NO: 45207 - RNA, 22 nt, Artificial Sequence
  RPE65 RNA guide
auggguuugugucaauagcccu

SEQ ID NO: 45208 - RNA, 22 nt, Artificial Sequence
  RPE65 RNA guide
auggucaaaaugccuuuugcaa

SEQ ID NO: 45209 - RNA, 22 nt, Artificial Sequence
  RPE65 RNA guide
augguccucaaacuuuagugug

SEQ ID NO: 45210 - RNA, 22 nt, Artificial Sequence
  RPE65 RNA guide
augugaagcugcaaaaucaccc

SEQ ID NO: 45211 - RNA, 22 nt, Artificial Sequence
  RPE65 RNA guide
augugacuccacuacacuccac

SEQ ID NO: 45212 - RNA, 22 nt, Artificial Sequence
  RPE65 RNA guide
augugauucugaugcacacuaa

SEQ ID NO: 45213 - RNA, 22 nt, Artificial Sequence
  RPE65 RNA guide
augugcauaagaauuacuguac

SEQ ID NO: 45214 - RNA, 22 nt, Artificial Sequence
  RPE65 RNA guide
auguguuucuuugccuguauaa

SEQ ID NO: 45215 - RNA, 22 nt, Artificial Sequence
  RPE65 RNA guide
auguugcaaaaggcauuuugac

SEQ ID NO: 45216 - RNA, 22 nt, Artificial Sequence
  RPE65 RNA guide
auuacuguacagggcuauugac

SEQ ID NO: 45217 - RNA, 22 nt, Artificial Sequence
  RPE65 RNA guide
auucugagguuucuucccuacu

SEQ ID NO: 45218 - RNA, 22 nt, Artificial Sequence
  RPE65 RNA guide
auucugaugcacacuaaaguuu

SEQ ID NO: 45219 - RNA, 22 nt, Artificial Sequence
  RPE65 RNA guide
auugacacaaacccaucuaaac

SEQ ID NO: 45220 - RNA, 22 nt, Artificial Sequence
  RPE65 RNA guide
auugcaagaugugacuccacua

SEQ ID NO: 45221 - RNA, 22 nt, Artificial Sequence
  RPE65 RNA guide
auuuacucacuaguaagugaau

SEQ ID NO: 45222 - RNA, 22 nt, Artificial Sequence
  RPE65 RNA guide
auuuagaacagcuuauacaggc

SEQ ID NO: 45223 - RNA, 22 nt, Artificial Sequence
  RPE65 RNA guide
auuucacuaagaagugcaaaug

SEQ ID NO: 45224 - RNA, 22 nt, Artificial Sequence
  RPE65 RNA guide
auuucaugugaagcugcaaaau

SEQ ID NO: 45225 - RNA, 22 nt, Artificial Sequence
  RPE65 RNA guide
auuugagugcacguuuccaaau

SEQ ID NO: 45226 - RNA, 22 nt, Artificial Sequence
  RPE65 RNA guide
auuuggaaacgugcacucaaau

SEQ ID NO: 45227 - RNA, 22 nt, Artificial Sequence
  RPE65 RNA guide
auuuggauuuuccugggugauu

SEQ ID NO: 45228 - RNA, 22 nt, Artificial Sequence
  RPE65 RNA guide
auuuucauuuucuccaucauuu

SEQ ID NO: 45229 - RNA, 22 nt, Artificial Sequence
  RPE65 RNA guide
auuuuccugggugauuuugcag

SEQ ID NO: 45230 - RNA, 22 nt, Artificial Sequence
  RPE65 RNA guide
auuuucuccaucauuugcacuu

SEQ ID NO: 45231 - RNA, 22 nt, Artificial Sequence
  RPE65 RNA guide
auuuugaccauucugagguuuc

SEQ ID NO: 45232 - RNA, 22 nt, Artificial Sequence
  RPE65 RNA guide
auuuugcagcuucacaugaaau

SEQ ID NO: 45233 - RNA, 22 nt, Artificial Sequence
  RPE65 RNA guide
caaaaggcauuuugaccauucu

SEQ ID NO: 45234 - RNA, 22 nt, Artificial Sequence
  RPE65 RNA guide
caaaaucacccaggaaaaucca

SEQ ID NO: 45235 - RNA, 22 nt, Artificial Sequence
  RPE65 RNA guide
caaaaugccuuuugcaacaucu

SEQ ID NO: 45236 - RNA, 22 nt, Artificial Sequence
  RPE65 RNA guide
caaaauguguuucuuugccugu

SEQ ID NO: 45237 - RNA, 22 nt, Artificial Sequence
  RPE65 RNA guide
caaacccaucuaaacuauaucc

SEQ ID NO: 45238 - RNA, 22 nt, Artificial Sequence
  RPE65 RNA guide
caaagcauuuagaacagcuuau

SEQ ID NO: 45239 - RNA, 22 nt, Artificial Sequence
  RPE65 RNA guide
caaaggauauaguuuagauggg

SEQ ID NO: 45240 - RNA, 22 nt, Artificial Sequence
  RPE65 RNA guide
caaauagcagcagauuuggaaa

SEQ ID NO: 45241 - RNA, 22 nt, Artificial Sequence
  RPE65 RNA guide
caaauaggguuguggcaagugg

SEQ ID NO: 45242 - RNA, 22 nt, Artificial Sequence
  RPE65 RNA guide
caaaucugcugcuauuuggauu

SEQ ID NO: 45243 - RNA, 22 nt, Artificial Sequence
  RPE65 RNA guide
caacaucuuaagaugcccaaag

SEQ ID NO: 45244 - RNA, 22 nt, Artificial Sequence
  RPE65 RNA guide
caacccuauuugagugcacguu

SEQ ID NO: 45245 - RNA, 22 nt, Artificial Sequence
  RPE65 RNA guide
caagaugugacuccacuacacu

SEQ ID NO: 45246 - RNA, 22 nt, Artificial Sequence
  RPE65 RNA guide
caaguggaguguaguggaguca

SEQ ID NO: 45247 - RNA, 22 nt, Artificial Sequence
  RPE65 RNA guide
caauagcccuguacaguaauuc

SEQ ID NO: 45248 - RNA, 22 nt, Artificial Sequence
  RPE65 RNA guide
caauagcuggagguggguuuua

SEQ ID NO: 45249 - RNA, 22 nt, Artificial Sequence
  RPE65 RNA guide
caaucaaaauguguuucuuugc

SEQ ID NO: 45250 - RNA, 22 nt, Artificial Sequence
  RPE65 RNA guide
cacaaacccaucuaaacuauau

SEQ ID NO: 45251 - RNA, 22 nt, Artificial Sequence
  RPE65 RNA guide
cacaacccuauuugagugcacg

SEQ ID NO: 45252 - RNA, 22 nt, Artificial Sequence
  RPE65 RNA guide
cacacuaaaguuugaggaccau

SEQ ID NO: 45253 - RNA, 22 nt, Artificial Sequence
  RPE65 RNA guide
cacaucuugcaauagcuggagg

SEQ ID NO: 45254 - RNA, 22 nt, Artificial Sequence
  RPE65 RNA guide
cacaugaaauuucacuaagaag

SEQ ID NO: 45255 - RNA, 22 nt, Artificial Sequence
  RPE65 RNA guide
cacauuuugauuguuuuagagg

SEQ ID NO: 45256 - RNA, 22 nt, Artificial Sequence
  RPE65 RNA guide
cacccaggaaaauccaaauagc

SEQ ID NO: 45257 - RNA, 22 nt, Artificial Sequence
  RPE65 RNA guide
caccuccagcuauugcaagaug

SEQ ID NO: 45258 - RNA, 22 nt, Artificial Sequence
  RPE65 RNA guide
cacguuuccaaaucugcugcua

SEQ ID NO: 45259 - RNA, 22 nt, Artificial Sequence
  RPE65 RNA guide
cacuaaaguuugaggaccauuc

SEQ ID NO: 45260 - RNA, 22 nt, Artificial Sequence
  RPE65 RNA guide
cacuaagaagugcaaaugaugg

SEQ ID NO: 45261 - RNA, 22 nt, Artificial Sequence
  RPE65 RNA guide
cacuacacuccacuugccacaa

SEQ ID NO: 45262 - RNA, 22 nt, Artificial Sequence
  RPE65 RNA guide
cacuaguaagugaaugguccuc

SEQ ID NO: 45263 - RNA, 22 nt, Artificial Sequence
  RPE65 RNA guide
cacucaaauaggguuguggcaa

SEQ ID NO: 45264 - RNA, 22 nt, Artificial Sequence
  RPE65 RNA guide
cacuccacuugccacaacccua

SEQ ID NO: 45265 - RNA, 22 nt, Artificial Sequence
  RPE65 RNA guide
cacuucuuagugaaauuucaug

SEQ ID NO: 45266 - RNA, 22 nt, Artificial Sequence
  RPE65 RNA guide
cacuugccacaacccuauuuga

SEQ ID NO: 45267 - RNA, 22 nt, Artificial Sequence
  RPE65 RNA guide
cagaauggucaaaaugccuuuu

SEQ ID NO: 45268 - RNA, 22 nt, Artificial Sequence
  RPE65 RNA guide
cagauuuggaaacgugcacuca

SEQ ID NO: 45269 - RNA, 22 nt, Artificial Sequence
  RPE65 RNA guide
cagcagauuuggaaacgugcac

SEQ ID NO: 45270 - RNA, 22 nt, Artificial Sequence
  RPE65 RNA guide
cagcuauugcaagaugugacuc

SEQ ID NO: 45271 - RNA, 22 nt, Artificial Sequence
  RPE65 RNA guide
cagcuuauacaggcaaagaaac

SEQ ID NO: 45272 - RNA, 22 nt, Artificial Sequence
  RPE65 RNA guide
cagcuucacaugaaauuucacu

SEQ ID NO: 45273 - RNA, 22 nt, Artificial Sequence
  RPE65 RNA guide
caggaaaauccaaauagcagca

SEQ ID NO: 45274 - RNA, 22 nt, Artificial Sequence
  RPE65 RNA guide
caggcaaagaaacacauuuuga

SEQ ID NO: 45275 - RNA, 22 nt, Artificial Sequence
  RPE65 RNA guide
cagggcuauugacacaaaccca

SEQ ID NO: 45276 - RNA, 22 nt, Artificial Sequence
  RPE65 RNA guide
caggggaguagggaagaaaccu

SEQ ID NO: 45277 - RNA, 22 nt, Artificial Sequence
  RPE65 RNA guide
cauaagaauuacuguacagggc

SEQ ID NO: 45278 - RNA, 22 nt, Artificial Sequence
  RPE65 RNA guide
caucagaaucacauaaagaguu

SEQ ID NO: 45279 - RNA, 22 nt, Artificial Sequence
  RPE65 RNA guide
caucauuugcacuucuuaguga

SEQ ID NO: 45280 - RNA, 22 nt, Artificial Sequence
  RPE65 RNA guide
caucuaaacuauauccuuuggg

SEQ ID NO: 45281 - RNA, 22 nt, Artificial Sequence
  RPE65 RNA guide
caucuuaagaugcccaaaggau

SEQ ID NO: 45282 - RNA, 22 nt, Artificial Sequence
  RPE65 RNA guide
caucuuaagauguugcaaaagg

SEQ ID NO: 45283 - RNA, 22 nt, Artificial Sequence
  RPE65 RNA guide
caucuugcaauagcuggaggug

SEQ ID NO: 45284 - RNA, 22 nt, Artificial Sequence
  RPE65 RNA guide
caugaaauuucacuaagaagug

SEQ ID NO: 45285 - RNA, 22 nt, Artificial Sequence
  RPE65 RNA guide
caugugaagcugcaaaaucacc

SEQ ID NO: 45286 - RNA, 22 nt, Artificial Sequence
  RPE65 RNA guide
cauucugagguuucuucccuac

SEQ ID NO: 45287 - RNA, 22 nt, Artificial Sequence
  RPE65 RNA guide
cauuuagaacagcuuauacagg

SEQ ID NO: 45288 - RNA, 22 nt, Artificial Sequence
  RPE65 RNA guide
cauuugcacuucuuagugaaau

SEQ ID NO: 45289 - RNA, 22 nt, Artificial Sequence
  RPE65 RNA guide
cauuuucuccaucauuugcacu

SEQ ID NO: 45290 - RNA, 22 nt, Artificial Sequence
  RPE65 RNA guide
cauuuugaccauucugagguuu

SEQ ID NO: 45291 - RNA, 22 nt, Artificial Sequence
  RPE65 RNA guide
cauuuugauuguuuuagagggg

SEQ ID NO: 45292 - RNA, 22 nt, Artificial Sequence
  RPE65 RNA guide
ccaaagccuuuuaaaaccacuu

SEQ ID NO: 45293 - RNA, 22 nt, Artificial Sequence
  RPE65 RNA guide
ccaaaggauauaguuuagaugg

SEQ ID NO: 45294 - RNA, 22 nt, Artificial Sequence
  RPE65 RNA guide
ccaaauagcagcagauuuggaa

SEQ ID NO: 45295 - RNA, 22 nt, Artificial Sequence
  RPE65 RNA guide
ccaaaucugcugcuauuuggau

SEQ ID NO: 45296 - RNA, 22 nt, Artificial Sequence
  RPE65 RNA guide
ccacaacccuauuugagugcac

SEQ ID NO: 45297 - RNA, 22 nt, Artificial Sequence
  RPE65 RNA guide
ccaccuccagcuauugcaagau

SEQ ID NO: 45298 - RNA, 22 nt, Artificial Sequence
  RPE65 RNA guide
ccacuacacuccacuugccaca

SEQ ID NO: 45299 - RNA, 22 nt, Artificial Sequence
  RPE65 RNA guide
ccacuugccacaacccuauuug

SEQ ID NO: 45300 - RNA, 22 nt, Artificial Sequence
  RPE65 RNA guide
ccagcuauugcaagaugugacu

SEQ ID NO: 45301 - RNA, 22 nt, Artificial Sequence
  RPE65 RNA guide
ccaggaaaauccaaauagcagc

SEQ ID NO: 45302 - RNA, 22 nt, Artificial Sequence
  RPE65 RNA guide
ccaucauuugcacuucuuagug

SEQ ID NO: 45303 - RNA, 22 nt, Artificial Sequence
  RPE65 RNA guide
ccaucuaaacuauauccuuugg

SEQ ID NO: 45304 - RNA, 22 nt, Artificial Sequence
  RPE65 RNA guide
ccauucacuuacuagugaguaa

SEQ ID NO: 45305 - RNA, 22 nt, Artificial Sequence
  RPE65 RNA guide
ccauucugagguuucuucccua

SEQ ID NO: 45306 - RNA, 22 nt, Artificial Sequence
  RPE65 RNA guide
cccaaaggauauaguuuagaug

SEQ ID NO: 45307 - RNA, 22 nt, Artificial Sequence
  RPE65 RNA guide
cccaccuccagcuauugcaaga

SEQ ID NO: 45308 - RNA, 22 nt, Artificial Sequence
  RPE65 RNA guide
cccaggaaaauccaaauagcag

SEQ ID NO: 45309 - RNA, 22 nt, Artificial Sequence
  RPE65 RNA guide
cccaucuaaacuauauccuuug

SEQ ID NO: 45310 - RNA, 22 nt, Artificial Sequence
  RPE65 RNA guide
ccccucuaaaacaaucaaaaug

SEQ ID NO: 45311 - RNA, 22 nt, Artificial Sequence
  RPE65 RNA guide
ccccugacuuaaaacccaccuc

SEQ ID NO: 45312 - RNA, 22 nt, Artificial Sequence
  RPE65 RNA guide
cccuacuccccugacuuaaaac

SEQ ID NO: 45313 - RNA, 22 nt, Artificial Sequence
  RPE65 RNA guide
cccuauuugagugcacguuucc

SEQ ID NO: 45314 - RNA, 22 nt, Artificial Sequence
  RPE65 RNA guide
cccucuaaaacaaucaaaaugu

SEQ ID NO: 45315 - RNA, 22 nt, Artificial Sequence
  RPE65 RNA guide
cccugacuuaaaacccaccucc

SEQ ID NO: 45316 - RNA, 22 nt, Artificial Sequence
  RPE65 RNA guide
cccuguacaguaauucuuaugc

SEQ ID NO: 45317 - RNA, 22 nt, Artificial Sequence
  RPE65 RNA guide
ccuacuccccugacuuaaaacc

SEQ ID NO: 45318 - RNA, 22 nt, Artificial Sequence
  RPE65 RNA guide
ccuauuugagugcacguuucca

SEQ ID NO: 45319 - RNA, 22 nt, Artificial Sequence
  RPE65 RNA guide
ccucaaacuuuagugugcauca

SEQ ID NO: 45320 - RNA, 22 nt, Artificial Sequence
  RPE65 RNA guide
ccucagaauggucaaaaugccu

SEQ ID NO: 45321 - RNA, 22 nt, Artificial Sequence
  RPE65 RNA guide
ccuccagcuauugcaagaugug

SEQ ID NO: 45322 - RNA, 22 nt, Artificial Sequence
  RPE65 RNA guide
ccucuaaaacaaucaaaaugug

SEQ ID NO: 45323 - RNA, 22 nt, Artificial Sequence
  RPE65 RNA guide
ccugacuuaaaacccaccucca

SEQ ID NO: 45324 - RNA, 22 nt, Artificial Sequence
  RPE65 RNA guide
ccugggugauuuugcagcuuca

SEQ ID NO: 45325 - RNA, 22 nt, Artificial Sequence
  RPE65 RNA guide
ccuguacaguaauucuuaugca

SEQ ID NO: 45326 - RNA, 22 nt, Artificial Sequence
  RPE65 RNA guide
ccuguauaagcuguucuaaaug

SEQ ID NO: 45327 - RNA, 22 nt, Artificial Sequence
  RPE65 RNA guide
ccuuugggcaucuuaagauguu

SEQ ID NO: 45328 - RNA, 22 nt, Artificial Sequence
  RPE65 RNA guide
ccuuuugcaacaucuuaagaug

SEQ ID NO: 45329 - RNA, 22 nt, Artificial Sequence
  RPE65 RNA guide
cgugcacucaaauaggguugug

SEQ ID NO: 45330 - RNA, 22 nt, Artificial Sequence
  RPE65 RNA guide
cguuuccaaaucugcugcuauu

SEQ ID NO: 45331 - RNA, 22 nt, Artificial Sequence
  RPE65 RNA guide
cuaaacuauauccuuugggcau

SEQ ID NO: 45332 - RNA, 22 nt, Artificial Sequence
  RPE65 RNA guide
cuaaaguuugaggaccauucac

SEQ ID NO: 45333 - RNA, 22 nt, Artificial Sequence
  RPE65 RNA guide
cuaagaagugcaaaugauggag

SEQ ID NO: 45334 - RNA, 22 nt, Artificial Sequence
  RPE65 RNA guide
cuacacuccacuugccacaacc

SEQ ID NO: 45335 - RNA, 22 nt, Artificial Sequence
  RPE65 RNA guide
cuacuccccugacuuaaaaccc

SEQ ID NO: 45336 - RNA, 22 nt, Artificial Sequence
  RPE65 RNA guide
cuaguaagugaaugguccucaa

SEQ ID NO: 45337 - RNA, 22 nt, Artificial Sequence
  RPE65 RNA guide
cuauauccuuugggcaucuuaa

SEQ ID NO: 45338 - RNA, 22 nt, Artificial Sequence
  RPE65 RNA guide
cuauugacacaaacccaucuaa

SEQ ID NO: 45339 - RNA, 22 nt, Artificial Sequence
  RPE65 RNA guide
cuauugcaagaugugacuccac

SEQ ID NO: 45340 - RNA, 22 nt, Artificial Sequence
  RPE65 RNA guide
cuauuugagugcacguuuccaa

SEQ ID NO: 45341 - RNA, 22 nt, Artificial Sequence
  RPE65 RNA guide
cuauuuggauuuuccuggguga

SEQ ID NO: 45342 - RNA, 22 nt, Artificial Sequence
  RPE65 RNA guide
cucaaauaggguuguggcaagu

SEQ ID NO: 45343 - RNA, 22 nt, Artificial Sequence
  RPE65 RNA guide
cucacuaguaagugaauggucc

SEQ ID NO: 45344 - RNA, 22 nt, Artificial Sequence
  RPE65 RNA guide
cucagaauggucaaaaugccuu

SEQ ID NO: 45345 - RNA, 22 nt, Artificial Sequence
  RPE65 RNA guide
cuccacuacacuccacuugcca

SEQ ID NO: 45346 - RNA, 22 nt, Artificial Sequence
  RPE65 RNA guide
cuccacuugccacaacccuauu

SEQ ID NO: 45347 - RNA, 22 nt, Artificial Sequence
  RPE65 RNA guide
cuccagcuauugcaagauguga

SEQ ID NO: 45348 - RNA, 22 nt, Artificial Sequence
  RPE65 RNA guide
cuccaucauuugcacuucuuag

SEQ ID NO: 45349 - RNA, 22 nt, Artificial Sequence
  RPE65 RNA guide
cuccccugacuuaaaacccacc

SEQ ID NO: 45350 - RNA, 22 nt, Artificial Sequence
  RPE65 RNA guide
cucuuuaugugauucugaugca

SEQ ID NO: 45351 - RNA, 22 nt, Artificial Sequence
  RPE65 RNA guide
cugaaauaaagugguuuuaaaa

SEQ ID NO: 45352 - RNA, 22 nt, Artificial Sequence
  RPE65 RNA guide
cugacuuaaaacccaccuccag

SEQ ID NO: 45353 - RNA, 22 nt, Artificial Sequence
  RPE65 RNA guide
cugagguuucuucccuacuccc

SEQ ID NO: 45354 - RNA, 22 nt, Artificial Sequence
  RPE65 RNA guide
cugcaaaaucacccaggaaaau

SEQ ID NO: 45355 - RNA, 22 nt, Artificial Sequence
  RPE65 RNA guide
cugcaaucaguauuuuaagaaa

SEQ ID NO: 45356 - RNA, 22 nt, Artificial Sequence
  RPE65 RNA guide
cugcuauuuggauuuuccuggg

SEQ ID NO: 45357 - RNA, 22 nt, Artificial Sequence
  RPE65 RNA guide
cugcugcuauuuggauuuuccu

SEQ ID NO: 45358 - RNA, 22 nt, Artificial Sequence
  RPE65 RNA guide
cuggagguggguuuuaagucag

SEQ ID NO: 45359 - RNA, 22 nt, Artificial Sequence
  RPE65 RNA guide
cugggugauuuugcagcuucac

SEQ ID NO: 45360 - RNA, 22 nt, Artificial Sequence
  RPE65 RNA guide
cuguacagggcuauugacacaa

SEQ ID NO: 45361 - RNA, 22 nt, Artificial Sequence
  RPE65 RNA guide
cuguacaguaauucuuaugcac

SEQ ID NO: 45362 - RNA, 22 nt, Artificial Sequence
  RPE65 RNA guide
cuguauaagcuguucuaaaugc

SEQ ID NO: 45363 - RNA, 22 nt, Artificial Sequence
  RPE65 RNA guide
cuuaaaacccaccuccagcuau

SEQ ID NO: 45364 - RNA, 22 nt, Artificial Sequence
  RPE65 RNA guide
cuuaagaugcccaaaggauaua

SEQ ID NO: 45365 - RNA, 22 nt, Artificial Sequence
  RPE65 RNA guide
cuuaagauguugcaaaaggcau

SEQ ID NO: 45366 - RNA, 22 nt, Artificial Sequence
  RPE65 RNA guide
cuuagugaaauuucaugugaag

SEQ ID NO: 45367 - RNA, 22 nt, Artificial Sequence
  RPE65 RNA guide
cuuauacaggcaaagaaacaca

SEQ ID NO: 45368 - RNA, 22 nt, Artificial Sequence
  RPE65 RNA guide
cuucacaugaaauuucacuaag

SEQ ID NO: 45369 - RNA, 22 nt, Artificial Sequence
  RPE65 RNA guide
cuuccaaagccuuuuaaaacca

SEQ ID NO: 45370 - RNA, 22 nt, Artificial Sequence
  RPE65 RNA guide
cuucccuacuccccugacuuaa

SEQ ID NO: 45371 - RNA, 22 nt, Artificial Sequence
  RPE65 RNA guide
cuucuuagugaaauuucaugug

SEQ ID NO: 45372 - RNA, 22 nt, Artificial Sequence
  RPE65 RNA guide
cuugcaauagcuggaggugggu

SEQ ID NO: 45373 - RNA, 22 nt, Artificial Sequence
  RPE65 RNA guide
cuugccacaacccuauuugagu

SEQ ID NO: 45374 - RNA, 22 nt, Artificial Sequence
  RPE65 RNA guide
cuuuagugugcaucagaaucac

SEQ ID NO: 45375 - RNA, 22 nt, Artificial Sequence
  RPE65 RNA guide
cuuuaugugauucugaugcaca

SEQ ID NO: 45376 - RNA, 22 nt, Artificial Sequence
  RPE65 RNA guide
cuuugccuguauaagcuguucu

SEQ ID NO: 45377 - RNA, 22 nt, Artificial Sequence
  RPE65 RNA guide
cuuugggcaucuuaagauguug

SEQ ID NO: 45378 - RNA, 22 nt, Artificial Sequence
  RPE65 RNA guide
cuuuugcaacaucuuaagaugc

SEQ ID NO: 45379 - RNA, 22 nt, Artificial Sequence
  RPE65 RNA guide
gaaaauaaccccucuaaaacaa

SEQ ID NO: 45380 - RNA, 22 nt, Artificial Sequence
  RPE65 RNA guide
gaaaauccaaauagcagcagau

SEQ ID NO: 45381 - RNA, 22 nt, Artificial Sequence
  RPE65 RNA guide
gaaaaugaaaauaaccccucua

SEQ ID NO: 45382 - RNA, 22 nt, Artificial Sequence
  RPE65 RNA guide
gaaacacauuuugauuguuuua

SEQ ID NO: 45383 - RNA, 22 nt, Artificial Sequence
  RPE65 RNA guide
gaaaccucagaauggucaaaau

SEQ ID NO: 45384 - RNA, 22 nt, Artificial Sequence
  RPE65 RNA guide
gaaacgugcacucaaauagggu

SEQ ID NO: 45385 - RNA, 22 nt, Artificial Sequence
  RPE65 RNA guide
gaaacucuuuaugugauucuga

SEQ ID NO: 45386 - RNA, 22 nt, Artificial Sequence
  RPE65 RNA guide
gaaauuucacuaagaagugcaa

SEQ ID NO: 45387 - RNA, 22 nt, Artificial Sequence
  RPE65 RNA guide
gaaauuucaugugaagcugcaa

SEQ ID NO: 45388 - RNA, 22 nt, Artificial Sequence
  RPE65 RNA guide
gaacagcuuauacaggcaaaga

SEQ ID NO: 45389 - RNA, 22 nt, Artificial Sequence
  RPE65 RNA guide
gaagaaaccucagaauggucaa

SEQ ID NO: 45390 - RNA, 22 nt, Artificial Sequence
  RPE65 RNA guide
gaagcugcaaaaucacccagga

SEQ ID NO: 45391 - RNA, 22 nt, Artificial Sequence
  RPE65 RNA guide
gaagugcaaaugauggagaaaa

SEQ ID NO: 45392 - RNA, 22 nt, Artificial Sequence
  RPE65 RNA guide
gaauggucaaaaugccuuuugc

SEQ ID NO: 45393 - RNA, 22 nt, Artificial Sequence
  RPE65 RNA guide
gaaugguccucaaacuuuagug

SEQ ID NO: 45394 - RNA, 22 nt, Artificial Sequence
  RPE65 RNA guide
gaauuacuguacagggcuauug

SEQ ID NO: 45395 - RNA, 22 nt, Artificial Sequence
  RPE65 RNA guide
gacacaaacccaucuaaacuau

SEQ ID NO: 45396 - RNA, 22 nt, Artificial Sequence
  RPE65 RNA guide
gaccauucacuuacuagugagu

SEQ ID NO: 45397 - RNA, 22 nt, Artificial Sequence
  RPE65 RNA guide
gaccauucugagguuucuuccc

SEQ ID NO: 45398 - RNA, 22 nt, Artificial Sequence
  RPE65 RNA guide
gacuccacuacacuccacuugc

SEQ ID NO: 45399 - RNA, 22 nt, Artificial Sequence
  RPE65 RNA guide
gacuuaaaacccaccuccagcu

SEQ ID NO: 45400 - RNA, 22 nt, Artificial Sequence
  RPE65 RNA guide
gagaaaaugaaaauaaccccuc

SEQ ID NO: 45401 - RNA, 22 nt, Artificial Sequence
  RPE65 RNA guide
gaggaccauucacuuacuagug

SEQ ID NO: 45402 - RNA, 22 nt, Artificial Sequence
  RPE65 RNA guide
gagggguuauuuucauuuucuc

SEQ ID NO: 45403 - RNA, 22 nt, Artificial Sequence
  RPE65 RNA guide
gagguggguuuuaagucagggg

SEQ ID NO: 45404 - RNA, 22 nt, Artificial Sequence
  RPE65 RNA guide
gagguuucuucccuacuccccu

SEQ ID NO: 45405 - RNA, 22 nt, Artificial Sequence
  RPE65 RNA guide
gaguagggaagaaaccucagaa

SEQ ID NO: 45406 - RNA, 22 nt, Artificial Sequence
  RPE65 RNA guide
gagucacaucuugcaauagcug

SEQ ID NO: 45407 - RNA, 22 nt, Artificial Sequence
  RPE65 RNA guide
gagugcacguuuccaaaucugc

SEQ ID NO: 45408 - RNA, 22 nt, Artificial Sequence
  RPE65 RNA guide
gaguguaguggagucacaucuu

SEQ ID NO: 45409 - RNA, 22 nt, Artificial Sequence
  RPE65 RNA guide
gauauaguuuagauggguuugu

SEQ ID NO: 45410 - RNA, 22 nt, Artificial Sequence
  RPE65 RNA guide
gaugcacacuaaaguuugagga

SEQ ID NO: 45411 - RNA, 22 nt, Artificial Sequence
  RPE65 RNA guide
gaugcccaaaggauauaguuua

SEQ ID NO: 45412 - RNA, 22 nt, Artificial Sequence
  RPE65 RNA guide
gauggagaaaaugaaaauaacc

SEQ ID NO: 45413 - RNA, 22 nt, Artificial Sequence
  RPE65 RNA guide
gauggguuugugucaauagccc

SEQ ID NO: 45414 - RNA, 22 nt, Artificial Sequence
  RPE65 RNA guide
gaugugacuccacuacacucca

SEQ ID NO: 45415 - RNA, 22 nt, Artificial Sequence
  RPE65 RNA guide
gauguugcaaaaggcauuuuga

SEQ ID NO: 45416 - RNA, 22 nt, Artificial Sequence
  RPE65 RNA guide
gauuguuuuagagggguuauuu

SEQ ID NO: 45417 - RNA, 22 nt, Artificial Sequence
  RPE65 RNA guide
gauuuggaaacgugcacucaaa

SEQ ID NO: 45418 - RNA, 22 nt, Artificial Sequence
  RPE65 RNA guide
gauuuuccugggugauuuugca

SEQ ID NO: 45419 - RNA, 22 nt, Artificial Sequence
  RPE65 RNA guide
gauuuugcagcuucacaugaaa

SEQ ID NO: 45420 - RNA, 22 nt, Artificial Sequence
  RPE65 RNA guide
gcaaaaggcauuuugaccauuc

SEQ ID NO: 45421 - RNA, 22 nt, Artificial Sequence
  RPE65 RNA guide
gcaaaaucacccaggaaaaucc

SEQ ID NO: 45422 - RNA, 22 nt, Artificial Sequence
  RPE65 RNA guide
gcaacaucuuaagaugcccaaa

SEQ ID NO: 45423 - RNA, 22 nt, Artificial Sequence
  RPE65 RNA guide
gcaagaugugacuccacuacac

SEQ ID NO: 45424 - RNA, 22 nt, Artificial Sequence
  RPE65 RNA guide
gcaaguggaguguaguggaguc

SEQ ID NO: 45425 - RNA, 22 nt, Artificial Sequence
  RPE65 RNA guide
gcaauagcuggagguggguuuu

SEQ ID NO: 45426 - RNA, 22 nt, Artificial Sequence
  RPE65 RNA guide
gcacacuaaaguuugaggacca

SEQ ID NO: 45427 - RNA, 22 nt, Artificial Sequence
  RPE65 RNA guide
gcacguuuccaaaucugcugcu

SEQ ID NO: 45428 - RNA, 22 nt, Artificial Sequence
  RPE65 RNA guide
gcacucaaauaggguuguggca

SEQ ID NO: 45429 - RNA, 22 nt, Artificial Sequence
  RPE65 RNA guide
gcacuucuuagugaaauuucau

SEQ ID NO: 45430 - RNA, 22 nt, Artificial Sequence
  RPE65 RNA guide
gcagauuuggaaacgugcacuc

SEQ ID NO: 45431 - RNA, 22 nt, Artificial Sequence
  RPE65 RNA guide
gcagcagauuuggaaacgugca

SEQ ID NO: 45432 - RNA, 22 nt, Artificial Sequence
  RPE65 RNA guide
gcagcuucacaugaaauuucac

SEQ ID NO: 45433 - RNA, 22 nt, Artificial Sequence
  RPE65 RNA guide
gcauaagaauuacuguacaggg

SEQ ID NO: 45434 - RNA, 22 nt, Artificial Sequence
  RPE65 RNA guide
gcaucagaaucacauaaagagu

SEQ ID NO: 45435 - RNA, 22 nt, Artificial Sequence
  RPE65 RNA guide
gcaucuuaagauguugcaaaag

SEQ ID NO: 45436 - RNA, 22 nt, Artificial Sequence
  RPE65 RNA guide
gcauuuagaacagcuuauacag

SEQ ID NO: 45437 - RNA, 22 nt, Artificial Sequence
  RPE65 RNA guide
gcauuuugaccauucugagguu

SEQ ID NO: 45438 - RNA, 22 nt, Artificial Sequence
  RPE65 RNA guide
gccacaacccuauuugagugca

SEQ ID NO: 45439 - RNA, 22 nt, Artificial Sequence
  RPE65 RNA guide
gcccaaaggauauaguuuagau

SEQ ID NO: 45440 - RNA, 22 nt, Artificial Sequence
  RPE65 RNA guide
gcccuguacaguaauucuuaug

SEQ ID NO: 45441 - RNA, 22 nt, Artificial Sequence
  RPE65 RNA guide
gccuguauaagcuguucuaaau

SEQ ID NO: 45442 - RNA, 22 nt, Artificial Sequence
  RPE65 RNA guide
gccuuuugcaacaucuuaagau

SEQ ID NO: 45443 - RNA, 22 nt, Artificial Sequence
  RPE65 RNA guide
gcuauugacacaaacccaucua

SEQ ID NO: 45444 - RNA, 22 nt, Artificial Sequence
  RPE65 RNA guide
gcuauugcaagaugugacucca

SEQ ID NO: 45445 - RNA, 22 nt, Artificial Sequence
  RPE65 RNA guide
gcuauuuggauuuuccugggug

SEQ ID NO: 45446 - RNA, 22 nt, Artificial Sequence
  RPE65 RNA guide
gcugcaaaaucacccaggaaaa

SEQ ID NO: 45447 - RNA, 22 nt, Artificial Sequence
  RPE65 RNA guide
gcugcuauuuggauuuuccugg

SEQ ID NO: 45448 - RNA, 22 nt, Artificial Sequence
  RPE65 RNA guide
gcuggagguggguuuuaaguca

SEQ ID NO: 45449 - RNA, 22 nt, Artificial Sequence
  RPE65 RNA guide
gcuuauacaggcaaagaaacac

SEQ ID NO: 45450 - RNA, 22 nt, Artificial Sequence
  RPE65 RNA guide
gcuucacaugaaauuucacuaa

SEQ ID NO: 45451 - RNA, 22 nt, Artificial Sequence
  RPE65 RNA guide
ggaaaauccaaauagcagcaga

SEQ ID NO: 45452 - RNA, 22 nt, Artificial Sequence
  RPE65 RNA guide
ggaaacgugcacucaaauaggg

SEQ ID NO: 45453 - RNA, 22 nt, Artificial Sequence
  RPE65 RNA guide
ggaagaaaccucagaaugguca

SEQ ID NO: 45454 - RNA, 22 nt, Artificial Sequence
  RPE65 RNA guide
ggaccauucacuuacuagugag

SEQ ID NO: 45455 - RNA, 22 nt, Artificial Sequence
  RPE65 RNA guide
ggagaaaaugaaaauaaccccu

SEQ ID NO: 45456 - RNA, 22 nt, Artificial Sequence
  RPE65 RNA guide
ggagguggguuuuaagucaggg

SEQ ID NO: 45457 - RNA, 22 nt, Artificial Sequence
  RPE65 RNA guide
ggaguagggaagaaaccucaga

SEQ ID NO: 45458 - RNA, 22 nt, Artificial Sequence
  RPE65 RNA guide
ggagucacaucuugcaauagcu

SEQ ID NO: 45459 - RNA, 22 nt, Artificial Sequence
  RPE65 RNA guide
ggaguguaguggagucacaucu

SEQ ID NO: 45460 - RNA, 22 nt, Artificial Sequence
  RPE65 RNA guide
ggauauaguuuagauggguuug

SEQ ID NO: 45461 - RNA, 22 nt, Artificial Sequence
  RPE65 RNA guide
ggauuuuccugggugauuuugc

SEQ ID NO: 45462 - RNA, 22 nt, Artificial Sequence
  RPE65 RNA guide
ggcaaagaaacacauuuugauu

SEQ ID NO: 45463 - RNA, 22 nt, Artificial Sequence
  RPE65 RNA guide
ggcaaguggaguguaguggagu

SEQ ID NO: 45464 - RNA, 22 nt, Artificial Sequence
  RPE65 RNA guide
ggcaucuuaagauguugcaaaa

SEQ ID NO: 45465 - RNA, 22 nt, Artificial Sequence
  RPE65 RNA guide
ggcauuuugaccauucugaggu

SEQ ID NO: 45466 - RNA, 22 nt, Artificial Sequence
  RPE65 RNA guide
ggcuauugacacaaacccaucu

SEQ ID NO: 45467 - RNA, 22 nt, Artificial Sequence
  RPE65 RNA guide
gggaagaaaccucagaaugguc

SEQ ID NO: 45468 - RNA, 22 nt, Artificial Sequence
  RPE65 RNA guide
gggaguagggaagaaaccucag

SEQ ID NO: 45469 - RNA, 22 nt, Artificial Sequence
  RPE65 RNA guide
gggcaucuuaagauguugcaaa

SEQ ID NO: 45470 - RNA, 22 nt, Artificial Sequence
  RPE65 RNA guide
gggcuauugacacaaacccauc

SEQ ID NO: 45471 - RNA, 22 nt, Artificial Sequence
  RPE65 RNA guide
ggggaguagggaagaaaccuca

SEQ ID NO: 45472 - RNA, 22 nt, Artificial Sequence
  RPE65 RNA guide
gggguuauuuucauuuucucca

SEQ ID NO: 45473 - RNA, 22 nt, Artificial Sequence
  RPE65 RNA guide
gggugauuuugcagcuucacau

SEQ ID NO: 45474 - RNA, 22 nt, Artificial Sequence
  RPE65 RNA guide
ggguuauuuucauuuucuccau

SEQ ID NO: 45475 - RNA, 22 nt, Artificial Sequence
  RPE65 RNA guide
ggguuguggcaaguggagugua

SEQ ID NO: 45476 - RNA, 22 nt, Artificial Sequence
  RPE65 RNA guide
ggguuugugucaauagcccugu

SEQ ID NO: 45477 - RNA, 22 nt, Artificial Sequence
  RPE65 RNA guide
ggguuuuaagucaggggaguag

SEQ ID NO: 45478 - RNA, 22 nt, Artificial Sequence
  RPE65 RNA guide
ggucaaaaugccuuuugcaaca

SEQ ID NO: 45479 - RNA, 22 nt, Artificial Sequence
  RPE65 RNA guide
ggugauuuugcagcuucacaug

SEQ ID NO: 45480 - RNA, 22 nt, Artificial Sequence
  RPE65 RNA guide
gguggguuuuaagucaggggag

SEQ ID NO: 45481 - RNA, 22 nt, Artificial Sequence
  RPE65 RNA guide
gguuguggcaaguggaguguag

SEQ ID NO: 45482 - RNA, 22 nt, Artificial Sequence
  RPE65 RNA guide
gguuucuucccuacuccccuga

SEQ ID NO: 45483 - RNA, 22 nt, Artificial Sequence
  RPE65 RNA guide
gguuugugucaauagcccugua

SEQ ID NO: 45484 - RNA, 22 nt, Artificial Sequence
  RPE65 RNA guide
gguuuuaagucaggggaguagg

SEQ ID NO: 45485 - RNA, 22 nt, Artificial Sequence
  RPE65 RNA guide
guaagugaaugguccucaaacu

SEQ ID NO: 45486 - RNA, 22 nt, Artificial Sequence
  RPE65 RNA guide
guacagggcuauugacacaaac

SEQ ID NO: 45487 - RNA, 22 nt, Artificial Sequence
  RPE65 RNA guide
guagggaagaaaccucagaaug

SEQ ID NO: 45488 - RNA, 22 nt, Artificial Sequence
  RPE65 RNA guide
guaguggagucacaucuugcaa

SEQ ID NO: 45489 - RNA, 22 nt, Artificial Sequence
  RPE65 RNA guide
guauaagcuguucuaaaugcuu

SEQ ID NO: 45490 - RNA, 22 nt, Artificial Sequence
  RPE65 RNA guide
gucaaaaugccuuuugcaacau

SEQ ID NO: 45491 - RNA, 22 nt, Artificial Sequence
  RPE65 RNA guide
gucaauagcccuguacaguaau

SEQ ID NO: 45492 - RNA, 22 nt, Artificial Sequence
  RPE65 RNA guide
gucacaucuugcaauagcugga

SEQ ID NO: 45493 - RNA, 22 nt, Artificial Sequence
  RPE65 RNA guide
gucaggggaguagggaagaaac

SEQ ID NO: 45494 - RNA, 22 nt, Artificial Sequence
  RPE65 RNA guide
gugaaauuucaugugaagcugc

SEQ ID NO: 45495 - RNA, 22 nt, Artificial Sequence
  RPE65 RNA guide
gugaagcugcaaaaucacccag

SEQ ID NO: 45496 - RNA, 22 nt, Artificial Sequence
  RPE65 RNA guide
gugaaugguccucaaacuuuag

SEQ ID NO: 45497 - RNA, 22 nt, Artificial Sequence
  RPE65 RNA guide
gugacuccacuacacuccacuu

SEQ ID NO: 45498 - RNA, 22 nt, Artificial Sequence
  RPE65 RNA guide
gugauuuugcagcuucacauga

SEQ ID NO: 45499 - RNA, 22 nt, Artificial Sequence
  RPE65 RNA guide
gugcaaaugauggagaaaauga

SEQ ID NO: 45500 - RNA, 22 nt, Artificial Sequence
  RPE65 RNA guide
gugcacguuuccaaaucugcug

SEQ ID NO: 45501 - RNA, 22 nt, Artificial Sequence
  RPE65 RNA guide
gugcacucaaauaggguugugg

SEQ ID NO: 45502 - RNA, 22 nt, Artificial Sequence
  RPE65 RNA guide
gugcauaagaauuacuguacag

SEQ ID NO: 45503 - RNA, 22 nt, Artificial Sequence
  RPE65 RNA guide
gugcaucagaaucacauaaaga

SEQ ID NO: 45504 - RNA, 22 nt, Artificial Sequence
  RPE65 RNA guide
guggagucacaucuugcaauag

SEQ ID NO: 45505 - RNA, 22 nt, Artificial Sequence
  RPE65 RNA guide
guggaguguaguggagucacau

SEQ ID NO: 45506 - RNA, 22 nt, Artificial Sequence
  RPE65 RNA guide
guggcaaguggaguguagugga

SEQ ID NO: 45507 - RNA, 22 nt, Artificial Sequence
  RPE65 RNA guide
guggguuuuaagucaggggagu

SEQ ID NO: 45508 - RNA, 22 nt, Artificial Sequence
  RPE65 RNA guide
guguaguggagucacaucuugc

SEQ ID NO: 45509 - RNA, 22 nt, Artificial Sequence
  RPE65 RNA guide
gugucaauagcccuguacagua

SEQ ID NO: 45510 - RNA, 22 nt, Artificial Sequence
  RPE65 RNA guide
gugugcaucagaaucacauaaa

SEQ ID NO: 45511 - RNA, 22 nt, Artificial Sequence
  RPE65 RNA guide
guguuucuuugccuguauaagc

SEQ ID NO: 45512 - RNA, 22 nt, Artificial Sequence
  RPE65 RNA guide
guugcaaaaggcauuuugacca

SEQ ID NO: 45513 - RNA, 22 nt, Artificial Sequence
  RPE65 RNA guide
guuguggcaaguggaguguagu

SEQ ID NO: 45514 - RNA, 22 nt, Artificial Sequence
  RPE65 RNA guide
guuuagauggguuugugucaau

SEQ ID NO: 45515 - RNA, 22 nt, Artificial Sequence
  RPE65 RNA guide
guuuccaaaucugcugcuauuu

SEQ ID NO: 45516 - RNA, 22 nt, Artificial Sequence
  RPE65 RNA guide
guuucuucccuacuccccugac

SEQ ID NO: 45517 - RNA, 22 nt, Artificial Sequence
  RPE65 RNA guide
guuucuuugccuguauaagcug

SEQ ID NO: 45518 - RNA, 22 nt, Artificial Sequence
  RPE65 RNA guide
guuugaggaccauucacuuacu

SEQ ID NO: 45519 - RNA, 22 nt, Artificial Sequence
  RPE65 RNA guide
guuugugucaauagcccuguac

SEQ ID NO: 45520 - RNA, 22 nt, Artificial Sequence
  RPE65 RNA guide
guuuuaagucaggggaguaggg

SEQ ID NO: 45521 - RNA, 22 nt, Artificial Sequence
  RPE65 RNA guide
guuuuagagggguuauuuucau

SEQ ID NO: 45522 - RNA, 22 nt, Artificial Sequence
  RPE65 RNA guide
uaaaacccaccuccagcuauug

SEQ ID NO: 45523 - RNA, 22 nt, Artificial Sequence
  RPE65 RNA guide
uaaacuauauccuuugggcauc

SEQ ID NO: 45524 - RNA, 22 nt, Artificial Sequence
  RPE65 RNA guide
uaaagugguuuuaaaaggcuuu

SEQ ID NO: 45525 - RNA, 22 nt, Artificial Sequence
  RPE65 RNA guide
uaaaguuugaggaccauucacu

SEQ ID NO: 45526 - RNA, 22 nt, Artificial Sequence
  RPE65 RNA guide
uaaccccucuaaaacaaucaaa

SEQ ID NO: 45527 - RNA, 22 nt, Artificial Sequence
  RPE65 RNA guide
uaagaagugcaaaugauggaga

SEQ ID NO: 45528 - RNA, 22 nt, Artificial Sequence
  RPE65 RNA guide
uaagaauuacuguacagggcua

SEQ ID NO: 45529 - RNA, 22 nt, Artificial Sequence
  RPE65 RNA guide
uaagaugcccaaaggauauagu

SEQ ID NO: 45530 - RNA, 22 nt, Artificial Sequence
  RPE65 RNA guide
uaagauguugcaaaaggcauuu

SEQ ID NO: 45531 - RNA, 22 nt, Artificial Sequence
  RPE65 RNA guide
uaagucaggggaguagggaaga

SEQ ID NO: 45532 - RNA, 22 nt, Artificial Sequence
  RPE65 RNA guide
uaagugaaugguccucaaacuu

SEQ ID NO: 45533 - RNA, 22 nt, Artificial Sequence
  RPE65 RNA guide
uaaugugcauaagaauuacugu

SEQ ID NO: 45534 - RNA, 22 nt, Artificial Sequence
  RPE65 RNA guide
uacaaagcauuuagaacagcuu

SEQ ID NO: 45535 - RNA, 22 nt, Artificial Sequence
  RPE65 RNA guide
uacacuccacuugccacaaccc

SEQ ID NO: 45536 - RNA, 22 nt, Artificial Sequence
  RPE65 RNA guide
uacaggcaaagaaacacauuuu

SEQ ID NO: 45537 - RNA, 22 nt, Artificial Sequence
  RPE65 RNA guide
uacagggcuauugacacaaacc

SEQ ID NO: 45538 - RNA, 22 nt, Artificial Sequence
  RPE65 RNA guide
uacucacuaguaagugaauggu

SEQ ID NO: 45539 - RNA, 22 nt, Artificial Sequence
  RPE65 RNA guide
uacuccccugacuuaaaaccca

SEQ ID NO: 45540 - RNA, 22 nt, Artificial Sequence
  RPE65 RNA guide
uacuguacagggcuauugacac

SEQ ID NO: 45541 - RNA, 22 nt, Artificial Sequence
  RPE65 RNA guide
uagaacagcuuauacaggcaaa

SEQ ID NO: 45542 - RNA, 22 nt, Artificial Sequence
  RPE65 RNA guide
uagagggguuauuuucauuuuc

SEQ ID NO: 45543 - RNA, 22 nt, Artificial Sequence
  RPE65 RNA guide
uagauggguuugugucaauagc

SEQ ID NO: 45544 - RNA, 22 nt, Artificial Sequence
  RPE65 RNA guide
uagcagcagauuuggaaacgug

SEQ ID NO: 45545 - RNA, 22 nt, Artificial Sequence
  RPE65 RNA guide
uagcccuguacaguaauucuua

SEQ ID NO: 45546 - RNA, 22 nt, Artificial Sequence
  RPE65 RNA guide
uagcuggagguggguuuuaagu

SEQ ID NO: 45547 - RNA, 22 nt, Artificial Sequence
  RPE65 RNA guide
uagggaagaaaccucagaaugg

SEQ ID NO: 45548 - RNA, 22 nt, Artificial Sequence
  RPE65 RNA guide
uaggguuguggcaaguggagug

SEQ ID NO: 45549 - RNA, 22 nt, Artificial Sequence
  RPE65 RNA guide
uaguaagugaaugguccucaaa

SEQ ID NO: 45550 - RNA, 22 nt, Artificial Sequence
  RPE65 RNA guide
uagugaaauuucaugugaagcu

SEQ ID NO: 45551 - RNA, 22 nt, Artificial Sequence
  RPE65 RNA guide
uaguggagucacaucuugcaau

SEQ ID NO: 45552 - RNA, 22 nt, Artificial Sequence
  RPE65 RNA guide
uagugugcaucagaaucacaua

SEQ ID NO: 45553 - RNA, 22 nt, Artificial Sequence
  RPE65 RNA guide
uaguuuagauggguuuguguca

SEQ ID NO: 45554 - RNA, 22 nt, Artificial Sequence
  RPE65 RNA guide
uauacaggcaaagaaacacauu

SEQ ID NO: 45555 - RNA, 22 nt, Artificial Sequence
  RPE65 RNA guide
uauaguuuagauggguuugugu

SEQ ID NO: 45556 - RNA, 22 nt, Artificial Sequence
  RPE65 RNA guide
uauauccuuugggcaucuuaag

SEQ ID NO: 45557 - RNA, 22 nt, Artificial Sequence
  RPE65 RNA guide
uauccuuugggcaucuuaagau

SEQ ID NO: 45558 - RNA, 22 nt, Artificial Sequence
  RPE65 RNA guide
uaugugauucugaugcacacua

SEQ ID NO: 45559 - RNA, 22 nt, Artificial Sequence
  RPE65 RNA guide
uauugacacaaacccaucuaaa

SEQ ID NO: 45560 - RNA, 22 nt, Artificial Sequence
  RPE65 RNA guide
uauugcaagaugugacuccacu

SEQ ID NO: 45561 - RNA, 22 nt, Artificial Sequence
  RPE65 RNA guide
uauuugagugcacguuuccaaa

SEQ ID NO: 45562 - RNA, 22 nt, Artificial Sequence
  RPE65 RNA guide
uauuuggauuuuccugggugau

SEQ ID NO: 45563 - RNA, 22 nt, Artificial Sequence
  RPE65 RNA guide
ucaaaaugccuuuugcaacauc

SEQ ID NO: 45564 - RNA, 22 nt, Artificial Sequence
  RPE65 RNA guide
ucaaaauguguuucuuugccug

SEQ ID NO: 45565 - RNA, 22 nt, Artificial Sequence
  RPE65 RNA guide
ucaaauaggguuguggcaagug

SEQ ID NO: 45566 - RNA, 22 nt, Artificial Sequence
  RPE65 RNA guide
ucaauagcccuguacaguaauu

SEQ ID NO: 45567 - RNA, 22 nt, Artificial Sequence
  RPE65 RNA guide
ucacaucuugcaauagcuggag

SEQ ID NO: 45568 - RNA, 22 nt, Artificial Sequence
  RPE65 RNA guide
ucacaugaaauuucacuaagaa

SEQ ID NO: 45569 - RNA, 22 nt, Artificial Sequence
  RPE65 RNA guide
ucacccaggaaaauccaaauag

SEQ ID NO: 45570 - RNA, 22 nt, Artificial Sequence
  RPE65 RNA guide
ucacuaagaagugcaaaugaug

SEQ ID NO: 45571 - RNA, 22 nt, Artificial Sequence
  RPE65 RNA guide
ucacuaguaagugaaugguccu

SEQ ID NO: 45572 - RNA, 22 nt, Artificial Sequence
  RPE65 RNA guide
ucagaauggucaaaaugccuuu

SEQ ID NO: 45573 - RNA, 22 nt, Artificial Sequence
  RPE65 RNA guide
ucaggggaguagggaagaaacc

SEQ ID NO: 45574 - RNA, 22 nt, Artificial Sequence
  RPE65 RNA guide
ucaugugaagcugcaaaaucac

SEQ ID NO: 45575 - RNA, 22 nt, Artificial Sequence
  RPE65 RNA guide
ucauuugcacuucuuagugaaa

SEQ ID NO: 45576 - RNA, 22 nt, Artificial Sequence
  RPE65 RNA guide
ucauuuucuccaucauuugcac

SEQ ID NO: 45577 - RNA, 22 nt, Artificial Sequence
  RPE65 RNA guide
uccaaagccuuuuaaaaccacu

SEQ ID NO: 45578 - RNA, 22 nt, Artificial Sequence
  RPE65 RNA guide
uccaaauagcagcagauuugga

SEQ ID NO: 45579 - RNA, 22 nt, Artificial Sequence
  RPE65 RNA guide
uccaaaucugcugcuauuugga

SEQ ID NO: 45580 - RNA, 22 nt, Artificial Sequence
  RPE65 RNA guide
uccacuacacuccacuugccac

SEQ ID NO: 45581 - RNA, 22 nt, Artificial Sequence
  RPE65 RNA guide
uccacuugccacaacccuauuu

SEQ ID NO: 45582 - RNA, 22 nt, Artificial Sequence
  RPE65 RNA guide
uccagcuauugcaagaugugac

SEQ ID NO: 45583 - RNA, 22 nt, Artificial Sequence
  RPE65 RNA guide
uccaucauuugcacuucuuagu

SEQ ID NO: 45584 - RNA, 22 nt, Artificial Sequence
  RPE65 RNA guide
uccccugacuuaaaacccaccu

SEQ ID NO: 45585 - RNA, 22 nt, Artificial Sequence
  RPE65 RNA guide
ucccuacuccccugacuuaaaa

SEQ ID NO: 45586 - RNA, 22 nt, Artificial Sequence
  RPE65 RNA guide
uccucaaacuuuagugugcauc

SEQ ID NO: 45587 - RNA, 22 nt, Artificial Sequence
  RPE65 RNA guide
uccugggugauuuugcagcuuc

SEQ ID NO: 45588 - RNA, 22 nt, Artificial Sequence
  RPE65 RNA guide
uccuuugggcaucuuaagaugu

SEQ ID NO: 45589 - RNA, 22 nt, Artificial Sequence
  RPE65 RNA guide
ucuaaacuauauccuuugggca

SEQ ID NO: 45590 - RNA, 22 nt, Artificial Sequence
  RPE65 RNA guide
ucuccaucauuugcacuucuua

SEQ ID NO: 45591 - RNA, 22 nt, Artificial Sequence
  RPE65 RNA guide
ucugagguuucuucccuacucc

SEQ ID NO: 45592 - RNA, 22 nt, Artificial Sequence
  RPE65 RNA guide
ucugcugcuauuuggauuuucc

SEQ ID NO: 45593 - RNA, 22 nt, Artificial Sequence
  RPE65 RNA guide
ucuuaagaugcccaaaggauau

SEQ ID NO: 45594 - RNA, 22 nt, Artificial Sequence
  RPE65 RNA guide
ucuuaagauguugcaaaaggca

SEQ ID NO: 45595 - RNA, 22 nt, Artificial Sequence
  RPE65 RNA guide
ucuuagugaaauuucaugugaa

SEQ ID NO: 45596 - RNA, 22 nt, Artificial Sequence
  RPE65 RNA guide
ucuucccuacuccccugacuua

SEQ ID NO: 45597 - RNA, 22 nt, Artificial Sequence
  RPE65 RNA guide
ucuugcaauagcuggagguggg

SEQ ID NO: 45598 - RNA, 22 nt, Artificial Sequence
  RPE65 RNA guide
ucuuuaugugauucugaugcac

SEQ ID NO: 45599 - RNA, 22 nt, Artificial Sequence
  RPE65 RNA guide
ucuuugccuguauaagcuguuc

SEQ ID NO: 45600 - RNA, 22 nt, Artificial Sequence
  RPE65 RNA guide
ugaaaauaaccccucuaaaaca

SEQ ID NO: 45601 - RNA, 22 nt, Artificial Sequence
  RPE65 RNA guide
ugaaauuucacuaagaagugca

SEQ ID NO: 45602 - RNA, 22 nt, Artificial Sequence
  RPE65 RNA guide
ugaaauuucaugugaagcugca

SEQ ID NO: 45603 - RNA, 22 nt, Artificial Sequence
  RPE65 RNA guide
ugaagcugcaaaaucacccagg

SEQ ID NO: 45604 - RNA, 22 nt, Artificial Sequence
  RPE65 RNA guide
ugaaugguccucaaacuuuagu

SEQ ID NO: 45605 - RNA, 22 nt, Artificial Sequence
  RPE65 RNA guide
ugacacaaacccaucuaaacua

SEQ ID NO: 45606 - RNA, 22 nt, Artificial Sequence
  RPE65 RNA guide
ugaccauucugagguuucuucc

SEQ ID NO: 45607 - RNA, 22 nt, Artificial Sequence
  RPE65 RNA guide
ugacuccacuacacuccacuug

SEQ ID NO: 45608 - RNA, 22 nt, Artificial Sequence
  RPE65 RNA guide
ugacuuaaaacccaccuccagc

SEQ ID NO: 45609 - RNA, 22 nt, Artificial Sequence
  RPE65 RNA guide
ugaggaccauucacuuacuagu

SEQ ID NO: 45610 - RNA, 22 nt, Artificial Sequence
  RPE65 RNA guide
ugagguuucuucccuacucccc

SEQ ID NO: 45611 - RNA, 22 nt, Artificial Sequence
  RPE65 RNA guide
ugagugcacguuuccaaaucug

SEQ ID NO: 45612 - RNA, 22 nt, Artificial Sequence
  RPE65 RNA guide
ugaugcacacuaaaguuugagg

SEQ ID NO: 45613 - RNA, 22 nt, Artificial Sequence
  RPE65 RNA guide
ugauggagaaaaugaaaauaac

SEQ ID NO: 45614 - RNA, 22 nt, Artificial Sequence
  RPE65 RNA guide
ugauuguuuuagagggguuauu

SEQ ID NO: 45615 - RNA, 22 nt, Artificial Sequence
  RPE65 RNA guide
ugauuuugcagcuucacaugaa

SEQ ID NO: 45616 - RNA, 22 nt, Artificial Sequence
  RPE65 RNA guide
ugcaaaaggcauuuugaccauu

SEQ ID NO: 45617 - RNA, 22 nt, Artificial Sequence
  RPE65 RNA guide
ugcaaaaucacccaggaaaauc

SEQ ID NO: 45618 - RNA, 22 nt, Artificial Sequence
  RPE65 RNA guide
ugcaacaucuuaagaugcccaa

SEQ ID NO: 45619 - RNA, 22 nt, Artificial Sequence
  RPE65 RNA guide
ugcaagaugugacuccacuaca

SEQ ID NO: 45620 - RNA, 22 nt, Artificial Sequence
  RPE65 RNA guide
ugcaauagcuggagguggguuu

SEQ ID NO: 45621 - RNA, 22 nt, Artificial Sequence
  RPE65 RNA guide
ugcacacuaaaguuugaggacc

SEQ ID NO: 45622 - RNA, 22 nt, Artificial Sequence
  RPE65 RNA guide
ugcacguuuccaaaucugcugc

SEQ ID NO: 45623 - RNA, 22 nt, Artificial Sequence
  RPE65 RNA guide
ugcacucaaauaggguuguggc

SEQ ID NO: 45624 - RNA, 22 nt, Artificial Sequence
  RPE65 RNA guide
ugcacuucuuagugaaauuuca

SEQ ID NO: 45625 - RNA, 22 nt, Artificial Sequence
  RPE65 RNA guide
ugcagcuucacaugaaauuuca

SEQ ID NO: 45626 - RNA, 22 nt, Artificial Sequence
  RPE65 RNA guide
ugcauaagaauuacuguacagg

SEQ ID NO: 45627 - RNA, 22 nt, Artificial Sequence
  RPE65 RNA guide
ugcaucagaaucacauaaagag

SEQ ID NO: 45628 - RNA, 22 nt, Artificial Sequence
  RPE65 RNA guide
ugccacaacccuauuugagugc

SEQ ID NO: 45629 - RNA, 22 nt, Artificial Sequence
  RPE65 RNA guide
ugcccaaaggauauaguuuaga

SEQ ID NO: 45630 - RNA, 22 nt, Artificial Sequence
  RPE65 RNA guide
ugccuguauaagcuguucuaaa

SEQ ID NO: 45631 - RNA, 22 nt, Artificial Sequence
  RPE65 RNA guide
ugccuuuugcaacaucuuaaga

SEQ ID NO: 45632 - RNA, 22 nt, Artificial Sequence
  RPE65 RNA guide
ugcuauuuggauuuuccugggu

SEQ ID NO: 45633 - RNA, 22 nt, Artificial Sequence
  RPE65 RNA guide
ugcugcuauuuggauuuuccug

SEQ ID NO: 45634 - RNA, 22 nt, Artificial Sequence
  RPE65 RNA guide
uggaaacgugcacucaaauagg

SEQ ID NO: 45635 - RNA, 22 nt, Artificial Sequence
  RPE65 RNA guide
uggagaaaaugaaaauaacccc

SEQ ID NO: 45636 - RNA, 22 nt, Artificial Sequence
  RPE65 RNA guide
uggagguggguuuuaagucagg

SEQ ID NO: 45637 - RNA, 22 nt, Artificial Sequence
  RPE65 RNA guide
uggagucacaucuugcaauagc

SEQ ID NO: 45638 - RNA, 22 nt, Artificial Sequence
  RPE65 RNA guide
uggaguguaguggagucacauc

SEQ ID NO: 45639 - RNA, 22 nt, Artificial Sequence
  RPE65 RNA guide
uggauuuuccugggugauuuug

SEQ ID NO: 45640 - RNA, 22 nt, Artificial Sequence
  RPE65 RNA guide
uggcaaguggaguguaguggag

SEQ ID NO: 45641 - RNA, 22 nt, Artificial Sequence
  RPE65 RNA guide
ugggcaucuuaagauguugcaa

SEQ ID NO: 45642 - RNA, 22 nt, Artificial Sequence
  RPE65 RNA guide
ugggugauuuugcagcuucaca

SEQ ID NO: 45643 - RNA, 22 nt, Artificial Sequence
  RPE65 RNA guide
uggguuugugucaauagcccug

SEQ ID NO: 45644 - RNA, 22 nt, Artificial Sequence
  RPE65 RNA guide
uggguuuuaagucaggggagua

SEQ ID NO: 45645 - RNA, 22 nt, Artificial Sequence
  RPE65 RNA guide
uggucaaaaugccuuuugcaac

SEQ ID NO: 45646 - RNA, 22 nt, Artificial Sequence
  RPE65 RNA guide
ugguccucaaacuuuagugugc

SEQ ID NO: 45647 - RNA, 22 nt, Artificial Sequence
  RPE65 RNA guide
uguacagggcuauugacacaaa

SEQ ID NO: 45648 - RNA, 22 nt, Artificial Sequence
  RPE65 RNA guide
uguaguggagucacaucuugca

SEQ ID NO: 45649 - RNA, 22 nt, Artificial Sequence
  RPE65 RNA guide
uguauaagcuguucuaaaugcu

SEQ ID NO: 45650 - RNA, 22 nt, Artificial Sequence
  RPE65 RNA guide
ugucaauagcccuguacaguaa

SEQ ID NO: 45651 - RNA, 22 nt, Artificial Sequence
  RPE65 RNA guide
ugugaagcugcaaaaucaccca

SEQ ID NO: 45652 - RNA, 22 nt, Artificial Sequence
  RPE65 RNA guide
ugugacuccacuacacuccacu

SEQ ID NO: 45653 - RNA, 22 nt, Artificial Sequence
  RPE65 RNA guide
ugugauucugaugcacacuaaa

SEQ ID NO: 45654 - RNA, 22 nt, Artificial Sequence
  RPE65 RNA guide
ugugcauaagaauuacuguaca

SEQ ID NO: 45655 - RNA, 22 nt, Artificial Sequence
  RPE65 RNA guide
ugugcaucagaaucacauaaag

SEQ ID NO: 45656 - RNA, 22 nt, Artificial Sequence
  RPE65 RNA guide
uguggcaaguggaguguagugg

SEQ ID NO: 45657 - RNA, 22 nt, Artificial Sequence
  RPE65 RNA guide
ugugucaauagcccuguacagu

SEQ ID NO: 45658 - RNA, 22 nt, Artificial Sequence
  RPE65 RNA guide
uguguuucuuugccuguauaag

SEQ ID NO: 45659 - RNA, 22 nt, Artificial Sequence
  RPE65 RNA guide
uguugcaaaaggcauuuugacc

SEQ ID NO: 45660 - RNA, 22 nt, Artificial Sequence
  RPE65 RNA guide
uguuucuuugccuguauaagcu

SEQ ID NO: 45661 - RNA, 22 nt, Artificial Sequence
  RPE65 RNA guide
uuaaaacccaccuccagcuauu

SEQ ID NO: 45662 - RNA, 22 nt, Artificial Sequence
  RPE65 RNA guide
uuaagaugcccaaaggauauag

SEQ ID NO: 45663 - RNA, 22 nt, Artificial Sequence
  RPE65 RNA guide
uuaagauguugcaaaaggcauu

SEQ ID NO: 45664 - RNA, 22 nt, Artificial Sequence
  RPE65 RNA guide
uuaagucaggggaguagggaag

SEQ ID NO: 45665 - RNA, 22 nt, Artificial Sequence
  RPE65 RNA guide
uuacucacuaguaagugaaugg

SEQ ID NO: 45666 - RNA, 22 nt, Artificial Sequence
  RPE65 RNA guide
uuacuguacagggcuauugaca

SEQ ID NO: 45667 - RNA, 22 nt, Artificial Sequence
  RPE65 RNA guide
uuagaacagcuuauacaggcaa

SEQ ID NO: 45668 - RNA, 22 nt, Artificial Sequence
  RPE65 RNA guide
uuagagggguuauuuucauuuu

SEQ ID NO: 45669 - RNA, 22 nt, Artificial Sequence
  RPE65 RNA guide
uuagauggguuugugucaauag

SEQ ID NO: 45670 - RNA, 22 nt, Artificial Sequence
  RPE65 RNA guide
uuagugaaauuucaugugaagc

SEQ ID NO: 45671 - RNA, 22 nt, Artificial Sequence
  RPE65 RNA guide
uuagugugcaucagaaucacau

SEQ ID NO: 45672 - RNA, 22 nt, Artificial Sequence
  RPE65 RNA guide
uuauacaggcaaagaaacacau

SEQ ID NO: 45673 - RNA, 22 nt, Artificial Sequence
  RPE65 RNA guide
uuaugugauucugaugcacacu

SEQ ID NO: 45674 - RNA, 22 nt, Artificial Sequence
  RPE65 RNA guide
uucacaugaaauuucacuaaga

SEQ ID NO: 45675 - RNA, 22 nt, Artificial Sequence
  RPE65 RNA guide
uucacuaagaagugcaaaugau

SEQ ID NO: 45676 - RNA, 22 nt, Artificial Sequence
  RPE65 RNA guide
uucaugugaagcugcaaaauca

SEQ ID NO: 45677 - RNA, 22 nt, Artificial Sequence
  RPE65 RNA guide
uucauuuucuccaucauuugca

SEQ ID NO: 45678 - RNA, 22 nt, Artificial Sequence
  RPE65 RNA guide
uuccaaagccuuuuaaaaccac

SEQ ID NO: 45679 - RNA, 22 nt, Artificial Sequence
  RPE65 RNA guide
uuccaaaucugcugcuauuugg

SEQ ID NO: 45680 - RNA, 22 nt, Artificial Sequence
  RPE65 RNA guide
uucccuacuccccugacuuaaa

SEQ ID NO: 45681 - RNA, 22 nt, Artificial Sequence
  RPE65 RNA guide
uuccugggugauuuugcagcuu

SEQ ID NO: 45682 - RNA, 22 nt, Artificial Sequence
  RPE65 RNA guide
uucuccaucauuugcacuucuu

SEQ ID NO: 45683 - RNA, 22 nt, Artificial Sequence
  RPE65 RNA guide
uucugagguuucuucccuacuc

SEQ ID NO: 45684 - RNA, 22 nt, Artificial Sequence
  RPE65 RNA guide
uucugaugcacacuaaaguuug

SEQ ID NO: 45685 - RNA, 22 nt, Artificial Sequence
  RPE65 RNA guide
uucuuagugaaauuucauguga

SEQ ID NO: 45686 - RNA, 22 nt, Artificial Sequence
  RPE65 RNA guide
uucuucccuacuccccugacuu

SEQ ID NO: 45687 - RNA, 22 nt, Artificial Sequence
  RPE65 RNA guide
uucuuugccuguauaagcuguu

SEQ ID NO: 45688 - RNA, 22 nt, Artificial Sequence
  RPE65 RNA guide
uugacacaaacccaucuaaacu

SEQ ID NO: 45689 - RNA, 22 nt, Artificial Sequence
  RPE65 RNA guide
uugaccauucugagguuucuuc

SEQ ID NO: 45690 - RNA, 22 nt, Artificial Sequence
  RPE65 RNA guide
uugaggaccauucacuuacuag

SEQ ID NO: 45691 - RNA, 22 nt, Artificial Sequence
  RPE65 RNA guide
uugagugcacguuuccaaaucu

SEQ ID NO: 45692 - RNA, 22 nt, Artificial Sequence
  RPE65 RNA guide
uugauuguuuuagagggguuau

SEQ ID NO: 45693 - RNA, 22 nt, Artificial Sequence
  RPE65 RNA guide
uugcaaaaggcauuuugaccau

SEQ ID NO: 45694 - RNA, 22 nt, Artificial Sequence
  RPE65 RNA guide
uugcaacaucuuaagaugccca

SEQ ID NO: 45695 - RNA, 22 nt, Artificial Sequence
  RPE65 RNA guide
uugcaagaugugacuccacuac

SEQ ID NO: 45696 - RNA, 22 nt, Artificial Sequence
  RPE65 RNA guide
uugcaauagcuggagguggguu

SEQ ID NO: 45697 - RNA, 22 nt, Artificial Sequence
  RPE65 RNA guide
uugcacuucuuagugaaauuuc

SEQ ID NO: 45698 - RNA, 22 nt, Artificial Sequence
  RPE65 RNA guide
uugcagcuucacaugaaauuuc

SEQ ID NO: 45699 - RNA, 22 nt, Artificial Sequence
  RPE65 RNA guide
uugccacaacccuauuugagug

SEQ ID NO: 45700 - RNA, 22 nt, Artificial Sequence
  RPE65 RNA guide
uugccuguauaagcuguucuaa

SEQ ID NO: 45701 - RNA, 22 nt, Artificial Sequence
  RPE65 RNA guide
uuggaaacgugcacucaaauag

SEQ ID NO: 45702 - RNA, 22 nt, Artificial Sequence
  RPE65 RNA guide
uuggauuuuccugggugauuuu

SEQ ID NO: 45703 - RNA, 22 nt, Artificial Sequence
  RPE65 RNA guide
uugggcaucuuaagauguugca

SEQ ID NO: 45704 - RNA, 22 nt, Artificial Sequence
  RPE65 RNA guide
uuguggcaaguggaguguagug

SEQ ID NO: 45705 - RNA, 22 nt, Artificial Sequence
  RPE65 RNA guide
uugugucaauagcccuguacag

SEQ ID NO: 45706 - RNA, 22 nt, Artificial Sequence
  RPE65 RNA guide
uuuaagucaggggaguagggaa

SEQ ID NO: 45707 - RNA, 22 nt, Artificial Sequence
  RPE65 RNA guide
uuuacucacuaguaagugaaug

SEQ ID NO: 45708 - RNA, 22 nt, Artificial Sequence
  RPE65 RNA guide
uuuagaacagcuuauacaggca

SEQ ID NO: 45709 - RNA, 22 nt, Artificial Sequence
  RPE65 RNA guide
uuuagagggguuauuuucauuu

SEQ ID NO: 45710 - RNA, 22 nt, Artificial Sequence
  RPE65 RNA guide
uuuagauggguuugugucaaua

SEQ ID NO: 45711 - RNA, 22 nt, Artificial Sequence
  RPE65 RNA guide
uuuagugugcaucagaaucaca

SEQ ID NO: 45712 - RNA, 22 nt, Artificial Sequence
  RPE65 RNA guide
uuuaugugauucugaugcacac

SEQ ID NO: 45713 - RNA, 22 nt, Artificial Sequence
  RPE65 RNA guide
uuucacuaagaagugcaaauga

SEQ ID NO: 45714 - RNA, 22 nt, Artificial Sequence
  RPE65 RNA guide
uuucaugugaagcugcaaaauc

SEQ ID NO: 45715 - RNA, 22 nt, Artificial Sequence
  RPE65 RNA guide
uuucauuuucuccaucauuugc

SEQ ID NO: 45716 - RNA, 22 nt, Artificial Sequence
  RPE65 RNA guide
uuuccaaaucugcugcuauuug

SEQ ID NO: 45717 - RNA, 22 nt, Artificial Sequence
  RPE65 RNA guide
uuuccugggugauuuugcagcu

SEQ ID NO: 45718 - RNA, 22 nt, Artificial Sequence
  RPE65 RNA guide
uuucuccaucauuugcacuucu

SEQ ID NO: 45719 - RNA, 22 nt, Artificial Sequence
  RPE65 RNA guide
uuucuucccuacuccccugacu

SEQ ID NO: 45720 - RNA, 22 nt, Artificial Sequence
  RPE65 RNA guide
uuucuuugccuguauaagcugu

SEQ ID NO: 45721 - RNA, 22 nt, Artificial Sequence
  RPE65 RNA guide
uuugaccauucugagguuucuu

SEQ ID NO: 45722 - RNA, 22 nt, Artificial Sequence
  RPE65 RNA guide
uuugaggaccauucacuuacua

SEQ ID NO: 45723 - RNA, 22 nt, Artificial Sequence
  RPE65 RNA guide
uuugagugcacguuuccaaauc

SEQ ID NO: 45724 - RNA, 22 nt, Artificial Sequence
  RPE65 RNA guide
uuugcaacaucuuaagaugccc

SEQ ID NO: 45725 - RNA, 22 nt, Artificial Sequence
  RPE65 RNA guide
uuugcacuucuuagugaaauuu

SEQ ID NO: 45726 - RNA, 22 nt, Artificial Sequence
  RPE65 RNA guide
uuugcagcuucacaugaaauuu

SEQ ID NO: 45727 - RNA, 22 nt, Artificial Sequence
  RPE65 RNA guide
uuugccuguauaagcuguucua

SEQ ID NO: 45728 - RNA, 22 nt, Artificial Sequence
  RPE65 RNA guide
uuuggaaacgugcacucaaaua

SEQ ID NO: 45729 - RNA, 22 nt, Artificial Sequence
  RPE65 RNA guide
uuuggauuuuccugggugauuu

SEQ ID NO: 45730 - RNA, 22 nt, Artificial Sequence
  RPE65 RNA guide
uuugggcaucuuaagauguugc

SEQ ID NO: 45731 - RNA, 22 nt, Artificial Sequence
  RPE65 RNA guide
uuugugucaauagcccuguaca

SEQ ID NO: 45732 - RNA, 22 nt, Artificial Sequence
  RPE65 RNA guide
uuuuaagucaggggaguaggga

SEQ ID NO: 45733 - RNA, 22 nt, Artificial Sequence
  RPE65 RNA guide
uuuucauuuucuccaucauuug

SEQ ID NO: 45734 - RNA, 22 nt, Artificial Sequence
  RPE65 RNA guide
uuuuccugggugauuuugcagc

SEQ ID NO: 45735 - RNA, 22 nt, Artificial Sequence
  RPE65 RNA guide
uuuucuccaucauuugcacuuc

SEQ ID NO: 45736 - RNA, 22 nt, Artificial Sequence
  RPE65 RNA guide
uuuugaccauucugagguuucu

SEQ ID NO: 45737 - RNA, 22 nt, Artificial Sequence
  RPE65 RNA guide
uuuugcaacaucuuaagaugcc

SEQ ID NO: 45738 - RNA, 22 nt, Artificial Sequence
  RPE65 RNA guide
uuuugcagcuucacaugaaauu

SEQ ID NO: 45739 - RNA, 20 nt, Artificial Sequence
  RPE65 RNA guide
aaacacaaaugggcuuguga

SEQ ID NO: 45740 - RNA, 20 nt, Artificial Sequence
  RPE65 RNA guide
aaacuugaguuuuccugaag

SEQ ID NO: 45741 - RNA, 20 nt, Artificial Sequence
  RPE65 RNA guide
aaagauuugcuuugccuacc

SEQ ID NO: 45742 - RNA, 20 nt, Artificial Sequence
  RPE65 RNA guide
aaagggcugauucucaagcc

SEQ ID NO: 45743 - RNA, 20 nt, Artificial Sequence
  RPE65 RNA guide
aaagguaggcaaagcaaauc

SEQ ID NO: 45744 - RNA, 20 nt, Artificial Sequence
  RPE65 RNA guide
aaaugggcuugugaaugaaa

SEQ ID NO: 45745 - RNA, 20 nt, Artificial Sequence
  RPE65 RNA guide
aaauuugucuguggcuugag

SEQ ID NO: 45746 - RNA, 20 nt, Artificial Sequence
  RPE65 RNA guide
aacacaaaugggcuugugaa

SEQ ID NO: 45747 - RNA, 20 nt, Artificial Sequence
  RPE65 RNA guide
aacugagcauaccacauaua

SEQ ID NO: 45748 - RNA, 20 nt, Artificial Sequence
  RPE65 RNA guide
aacuugaaggccugcuauga

SEQ ID NO: 45749 - RNA, 20 nt, Artificial Sequence
  RPE65 RNA guide
aacuugaguuuuccugaaga

SEQ ID NO: 45750 - RNA, 20 nt, Artificial Sequence
  RPE65 RNA guide
aagaaucaacagugccuaca

SEQ ID NO: 45751 - RNA, 20 nt, Artificial Sequence
  RPE65 RNA guide
aagauucauagcaggccuuc

SEQ ID NO: 45752 - RNA, 20 nt, Artificial Sequence
  RPE65 RNA guide
aagauuugcuuugccuaccu

SEQ ID NO: 45753 - RNA, 20 nt, Artificial Sequence
  RPE65 RNA guide
aagcccauuuguguuucuga

SEQ ID NO: 45754 - RNA, 20 nt, Artificial Sequence
  RPE65 RNA guide
aaggccugcuaugaaucuuc

SEQ ID NO: 45755 - RNA, 20 nt, Artificial Sequence
  RPE65 RNA guide
aagggcugauucucaagcca

SEQ ID NO: 45756 - RNA, 20 nt, Artificial Sequence
  RPE65 RNA guide
aagguaggcaaagcaaaucu

SEQ ID NO: 45757 - RNA, 20 nt, Artificial Sequence
  RPE65 RNA guide
aauauugugaucaggauugg

SEQ ID NO: 45758 - RNA, 20 nt, Artificial Sequence
  RPE65 RNA guide
aaucaacagugccuacauga

SEQ ID NO: 45759 - RNA, 20 nt, Artificial Sequence
  RPE65 RNA guide
aaucagcccuuucauucaca

SEQ ID NO: 45760 - RNA, 20 nt, Artificial Sequence
  RPE65 RNA guide
aaugaaagggcugauucuca

SEQ ID NO: 45761 - RNA, 20 nt, Artificial Sequence
  RPE65 RNA guide
aaugggcuugugaaugaaag

SEQ ID NO: 45762 - RNA, 20 nt, Artificial Sequence
  RPE65 RNA guide
aauuucauguaggcacuguu

SEQ ID NO: 45763 - RNA, 20 nt, Artificial Sequence
  RPE65 RNA guide
aauuugucuguggcuugaga

SEQ ID NO: 45764 - RNA, 20 nt, Artificial Sequence
  RPE65 RNA guide
acaaaugggcuugugaauga

SEQ ID NO: 45765 - RNA, 20 nt, Artificial Sequence
  RPE65 RNA guide
acaaauuugucuguggcuug

SEQ ID NO: 45766 - RNA, 20 nt, Artificial Sequence
  RPE65 RNA guide
acaagaaucaacagugccua

SEQ ID NO: 45767 - RNA, 20 nt, Artificial Sequence
  RPE65 RNA guide
acaagcccauuuguguuucu

SEQ ID NO: 45768 - RNA, 20 nt, Artificial Sequence
  RPE65 RNA guide
acacaaaugggcuugugaau

SEQ ID NO: 45769 - RNA, 20 nt, Artificial Sequence
  RPE65 RNA guide
accuuugauaccaauccuga

SEQ ID NO: 45770 - RNA, 20 nt, Artificial Sequence
  RPE65 RNA guide
acugagcauaccacauauau

SEQ ID NO: 45771 - RNA, 20 nt, Artificial Sequence
  RPE65 RNA guide
acuguugauucuuguaacug

SEQ ID NO: 45772 - RNA, 20 nt, Artificial Sequence
  RPE65 RNA guide
acuugaaggccugcuaugaa

SEQ ID NO: 45773 - RNA, 20 nt, Artificial Sequence
  RPE65 RNA guide
acuugaguuuuccugaagau

SEQ ID NO: 45774 - RNA, 20 nt, Artificial Sequence
  RPE65 RNA guide
agaaacacaaaugggcuugu

SEQ ID NO: 45775 - RNA, 20 nt, Artificial Sequence
  RPE65 RNA guide
agaaucaacagugccuacau

SEQ ID NO: 45776 - RNA, 20 nt, Artificial Sequence
  RPE65 RNA guide
agaaucagcccuuucauuca

SEQ ID NO: 45777 - RNA, 20 nt, Artificial Sequence
  RPE65 RNA guide
agauucauagcaggccuuca

SEQ ID NO: 45778 - RNA, 20 nt, Artificial Sequence
  RPE65 RNA guide
agauuugcuuugccuaccuu

SEQ ID NO: 45779 - RNA, 20 nt, Artificial Sequence
  RPE65 RNA guide
agcccuuucauucacaagcc

SEQ ID NO: 45780 - RNA, 20 nt, Artificial Sequence
  RPE65 RNA guide
aggauugguaucaaagguag

SEQ ID NO: 45781 - RNA, 20 nt, Artificial Sequence
  RPE65 RNA guide
aggcaaagcaaaucuuuaaa

SEQ ID NO: 45782 - RNA, 20 nt, Artificial Sequence
  RPE65 RNA guide
aggcacuguugauucuugua

SEQ ID NO: 45783 - RNA, 20 nt, Artificial Sequence
  RPE65 RNA guide
aggccugcuaugaaucuuca

SEQ ID NO: 45784 - RNA, 20 nt, Artificial Sequence
  RPE65 RNA guide
agggcugauucucaagccac

SEQ ID NO: 45785 - RNA, 20 nt, Artificial Sequence
  RPE65 RNA guide
agguaggcaaagcaaaucuu

SEQ ID NO: 45786 - RNA, 20 nt, Artificial Sequence
  RPE65 RNA guide
aguuacaagaaucaacagug

SEQ ID NO: 45787 - RNA, 20 nt, Artificial Sequence
  RPE65 RNA guide
aguuuaaagauuugcuuugc

SEQ ID NO: 45788 - RNA, 20 nt, Artificial Sequence
  RPE65 RNA guide
aguuuuccugaagauucaua

SEQ ID NO: 45789 - RNA, 20 nt, Artificial Sequence
  RPE65 RNA guide
auacaaauuugucuguggcu

SEQ ID NO: 45790 - RNA, 20 nt, Artificial Sequence
  RPE65 RNA guide
auauacaaauuugucugugg

SEQ ID NO: 45791 - RNA, 20 nt, Artificial Sequence
  RPE65 RNA guide
auauaugugguaugcucagu

SEQ ID NO: 45792 - RNA, 20 nt, Artificial Sequence
  RPE65 RNA guide
auaugugguaugcucaguua

SEQ ID NO: 45793 - RNA, 20 nt, Artificial Sequence
  RPE65 RNA guide
auauugugaucaggauuggu

SEQ ID NO: 45794 - RNA, 20 nt, Artificial Sequence
  RPE65 RNA guide
aucaaagguaggcaaagcaa

SEQ ID NO: 45795 - RNA, 20 nt, Artificial Sequence
  RPE65 RNA guide
aucaacagugccuacaugaa

SEQ ID NO: 45796 - RNA, 20 nt, Artificial Sequence
  RPE65 RNA guide
aucagcccuuucauucacaa

SEQ ID NO: 45797 - RNA, 20 nt, Artificial Sequence
  RPE65 RNA guide
aucaggauugguaucaaagg

SEQ ID NO: 45798 - RNA, 20 nt, Artificial Sequence
  RPE65 RNA guide
augaaagggcugauucucaa

SEQ ID NO: 45799 - RNA, 20 nt, Artificial Sequence
  RPE65 RNA guide
augaaucuucaggaaaacuc

SEQ ID NO: 45800 - RNA, 20 nt, Artificial Sequence
  RPE65 RNA guide
augcucaguuacaagaauca

SEQ ID NO: 45801 - RNA, 20 nt, Artificial Sequence
  RPE65 RNA guide
augggcuugugaaugaaagg

SEQ ID NO: 45802 - RNA, 20 nt, Artificial Sequence
  RPE65 RNA guide
auguaggcacuguugauucu

SEQ ID NO: 45803 - RNA, 20 nt, Artificial Sequence
  RPE65 RNA guide
augugguaugcucaguuaca

SEQ ID NO: 45804 - RNA, 20 nt, Artificial Sequence
  RPE65 RNA guide
auuaauuucauguaggcacu

SEQ ID NO: 45805 - RNA, 20 nt, Artificial Sequence
  RPE65 RNA guide
auucacaagcccauuugugu

SEQ ID NO: 45806 - RNA, 20 nt, Artificial Sequence
  RPE65 RNA guide
auucauagcaggccuucaag

SEQ ID NO: 45807 - RNA, 20 nt, Artificial Sequence
  RPE65 RNA guide
auucucaagccacagacaaa

SEQ ID NO: 45808 - RNA, 20 nt, Artificial Sequence
  RPE65 RNA guide
auucuuguaacugagcauac

SEQ ID NO: 45809 - RNA, 20 nt, Artificial Sequence
  RPE65 RNA guide
auugguaucaaagguaggca

SEQ ID NO: 45810 - RNA, 20 nt, Artificial Sequence
  RPE65 RNA guide
auugugaucaggauugguau

SEQ ID NO: 45811 - RNA, 20 nt, Artificial Sequence
  RPE65 RNA guide
auuucauguaggcacuguug

SEQ ID NO: 45812 - RNA, 20 nt, Artificial Sequence
  RPE65 RNA guide
auuugcuuugccuaccuuug

SEQ ID NO: 45813 - RNA, 20 nt, Artificial Sequence
  RPE65 RNA guide
auuugucuguggcuugagaa

SEQ ID NO: 45814 - RNA, 20 nt, Artificial Sequence
  RPE65 RNA guide
caaagguaggcaaagcaaau

SEQ ID NO: 45815 - RNA, 20 nt, Artificial Sequence
  RPE65 RNA guide
caaaugggcuugugaaugaa

SEQ ID NO: 45816 - RNA, 20 nt, Artificial Sequence
  RPE65 RNA guide
caaauuugucuguggcuuga

SEQ ID NO: 45817 - RNA, 20 nt, Artificial Sequence
  RPE65 RNA guide
caacagugccuacaugaaau

SEQ ID NO: 45818 - RNA, 20 nt, Artificial Sequence
  RPE65 RNA guide
caagaaucaacagugccuac

SEQ ID NO: 45819 - RNA, 20 nt, Artificial Sequence
  RPE65 RNA guide
caagccacagacaaauuugu

SEQ ID NO: 45820 - RNA, 20 nt, Artificial Sequence
  RPE65 RNA guide
caagcccauuuguguuucug

SEQ ID NO: 45821 - RNA, 20 nt, Artificial Sequence
  RPE65 RNA guide
caaguuuaaagauuugcuuu

SEQ ID NO: 45822 - RNA, 20 nt, Artificial Sequence
  RPE65 RNA guide
cacaaaugggcuugugaaug

SEQ ID NO: 45823 - RNA, 20 nt, Artificial Sequence
  RPE65 RNA guide
cacaagcccauuuguguuuc

SEQ ID NO: 45824 - RNA, 20 nt, Artificial Sequence
  RPE65 RNA guide
cacuguugauucuuguaacu

SEQ ID NO: 45825 - RNA, 20 nt, Artificial Sequence
  RPE65 RNA guide
cagaaacacaaaugggcuug

SEQ ID NO: 45826 - RNA, 20 nt, Artificial Sequence
  RPE65 RNA guide
cagcccuuucauucacaagc

SEQ ID NO: 45827 - RNA, 20 nt, Artificial Sequence
  RPE65 RNA guide
caggauugguaucaaaggua

SEQ ID NO: 45828 - RNA, 20 nt, Artificial Sequence
  RPE65 RNA guide
caguuacaagaaucaacagu

SEQ ID NO: 45829 - RNA, 20 nt, Artificial Sequence
  RPE65 RNA guide
cauauauacaaauuugucug

SEQ ID NO: 45830 - RNA, 20 nt, Artificial Sequence
  RPE65 RNA guide
cauguaggcacuguugauuc

SEQ ID NO: 45831 - RNA, 20 nt, Artificial Sequence
  RPE65 RNA guide
cauucacaagcccauuugug

SEQ ID NO: 45832 - RNA, 20 nt, Artificial Sequence
  RPE65 RNA guide
cccuuucauucacaagccca

SEQ ID NO: 45833 - RNA, 20 nt, Artificial Sequence
  RPE65 RNA guide
ccuaccuuugauaccaaucc

SEQ ID NO: 45834 - RNA, 20 nt, Artificial Sequence
  RPE65 RNA guide
ccugaagauucauagcaggc

SEQ ID NO: 45835 - RNA, 20 nt, Artificial Sequence
  RPE65 RNA guide
ccugcuaugaaucuucagga

SEQ ID NO: 45836 - RNA, 20 nt, Artificial Sequence
  RPE65 RNA guide
ccuuucauucacaagcccau

SEQ ID NO: 45837 - RNA, 20 nt, Artificial Sequence
  RPE65 RNA guide
ccuuugauaccaauccugau

SEQ ID NO: 45838 - RNA, 20 nt, Artificial Sequence
  RPE65 RNA guide
cuaccuuugauaccaauccu

SEQ ID NO: 45839 - RNA, 20 nt, Artificial Sequence
  RPE65 RNA guide
cuaugaaucuucaggaaaac

SEQ ID NO: 45840 - RNA, 20 nt, Artificial Sequence
  RPE65 RNA guide
cucaagccacagacaaauuu

SEQ ID NO: 45841 - RNA, 20 nt, Artificial Sequence
  RPE65 RNA guide
cucaaguuuaaagauuugcu

SEQ ID NO: 45842 - RNA, 20 nt, Artificial Sequence
  RPE65 RNA guide
cucaguuacaagaaucaaca

SEQ ID NO: 45843 - RNA, 20 nt, Artificial Sequence
  RPE65 RNA guide
cugaagauucauagcaggcc

SEQ ID NO: 45844 - RNA, 20 nt, Artificial Sequence
  RPE65 RNA guide
cugagcauaccacauauaua

SEQ ID NO: 45845 - RNA, 20 nt, Artificial Sequence
  RPE65 RNA guide
cugauucucaagccacagac

SEQ ID NO: 45846 - RNA, 20 nt, Artificial Sequence
  RPE65 RNA guide
cugcuaugaaucuucaggaa

SEQ ID NO: 45847 - RNA, 20 nt, Artificial Sequence
  RPE65 RNA guide
cuguggcuugagaaucagcc

SEQ ID NO: 45848 - RNA, 20 nt, Artificial Sequence
  RPE65 RNA guide
cuguucagaaacacaaaugg

SEQ ID NO: 45849 - RNA, 20 nt, Artificial Sequence
  RPE65 RNA guide
cuguugauucuuguaacuga

SEQ ID NO: 45850 - RNA, 20 nt, Artificial Sequence
  RPE65 RNA guide
cuucaggaaaacucaaguuu

SEQ ID NO: 45851 - RNA, 20 nt, Artificial Sequence
  RPE65 RNA guide
cuugaaggccugcuaugaau

SEQ ID NO: 45852 - RNA, 20 nt, Artificial Sequence
  RPE65 RNA guide
cuugagaaucagcccuuuca

SEQ ID NO: 45853 - RNA, 20 nt, Artificial Sequence
  RPE65 RNA guide
cuugaguuuuccugaagauu

SEQ ID NO: 45854 - RNA, 20 nt, Artificial Sequence
  RPE65 RNA guide
cuuguaacugagcauaccac

SEQ ID NO: 45855 - RNA, 20 nt, Artificial Sequence
  RPE65 RNA guide
cuugugaaugaaagggcuga

SEQ ID NO: 45856 - RNA, 20 nt, Artificial Sequence
  RPE65 RNA guide
cuuuaaacuugaguuuuccu

SEQ ID NO: 45857 - RNA, 20 nt, Artificial Sequence
  RPE65 RNA guide
cuuucauucacaagcccauu

SEQ ID NO: 45858 - RNA, 20 nt, Artificial Sequence
  RPE65 RNA guide
cuuugauaccaauccugauc

SEQ ID NO: 45859 - RNA, 20 nt, Artificial Sequence
  RPE65 RNA guide
cuuugccuaccuuugauacc

SEQ ID NO: 45860 - RNA, 20 nt, Artificial Sequence
  RPE65 RNA guide
gaaacacaaaugggcuugug

SEQ ID NO: 45861 - RNA, 20 nt, Artificial Sequence
  RPE65 RNA guide
gaaagggcugauucucaagc

SEQ ID NO: 45862 - RNA, 20 nt, Artificial Sequence
  RPE65 RNA guide
gaagauucauagcaggccuu

SEQ ID NO: 45863 - RNA, 20 nt, Artificial Sequence
  RPE65 RNA guide
gaaggccugcuaugaaucuu

SEQ ID NO: 45864 - RNA, 20 nt, Artificial Sequence
  RPE65 RNA guide
gaaucaacagugccuacaug

SEQ ID NO: 45865 - RNA, 20 nt, Artificial Sequence
  RPE65 RNA guide
gaaucagcccuuucauucac

SEQ ID NO: 45866 - RNA, 20 nt, Artificial Sequence
  RPE65 RNA guide
gaaucuucaggaaaacucaa

SEQ ID NO: 45867 - RNA, 20 nt, Artificial Sequence
  RPE65 RNA guide
gaaugaaagggcugauucuc

SEQ ID NO: 45868 - RNA, 20 nt, Artificial Sequence
  RPE65 RNA guide
gagaaucagcccuuucauuc

SEQ ID NO: 45869 - RNA, 20 nt, Artificial Sequence
  RPE65 RNA guide
gaguuuuccugaagauucau

SEQ ID NO: 45870 - RNA, 20 nt, Artificial Sequence
  RPE65 RNA guide
gauaccaauccugaucacaa

SEQ ID NO: 45871 - RNA, 20 nt, Artificial Sequence
  RPE65 RNA guide
gaucaggauugguaucaaag

SEQ ID NO: 45872 - RNA, 20 nt, Artificial Sequence
  RPE65 RNA guide
gauucauagcaggccuucaa

SEQ ID NO: 45873 - RNA, 20 nt, Artificial Sequence
  RPE65 RNA guide
gauucucaagccacagacaa

SEQ ID NO: 45874 - RNA, 20 nt, Artificial Sequence
  RPE65 RNA guide
gauucuuguaacugagcaua

SEQ ID NO: 45875 - RNA, 20 nt, Artificial Sequence
  RPE65 RNA guide
gauugguaucaaagguaggc

SEQ ID NO: 45876 - RNA, 20 nt, Artificial Sequence
  RPE65 RNA guide
gauuugcuuugccuaccuuu

SEQ ID NO: 45877 - RNA, 20 nt, Artificial Sequence
  RPE65 RNA guide
gcaaagcaaaucuuuaaacu

SEQ ID NO: 45878 - RNA, 20 nt, Artificial Sequence
  RPE65 RNA guide
gcacuguugauucuuguaac

SEQ ID NO: 45879 - RNA, 20 nt, Artificial Sequence
  RPE65 RNA guide
gccacagacaaauuuguaua

SEQ ID NO: 45880 - RNA, 20 nt, Artificial Sequence
  RPE65 RNA guide
gcccuuucauucacaagccc

SEQ ID NO: 45881 - RNA, 20 nt, Artificial Sequence
  RPE65 RNA guide
gccuaccuuugauaccaauc

SEQ ID NO: 45882 - RNA, 20 nt, Artificial Sequence
  RPE65 RNA guide
gccugcuaugaaucuucagg

SEQ ID NO: 45883 - RNA, 20 nt, Artificial Sequence
  RPE65 RNA guide
gcuaugaaucuucaggaaaa

SEQ ID NO: 45884 - RNA, 20 nt, Artificial Sequence
  RPE65 RNA guide
gcucaguuacaagaaucaac

SEQ ID NO: 45885 - RNA, 20 nt, Artificial Sequence
  RPE65 RNA guide
gcugauucucaagccacaga

SEQ ID NO: 45886 - RNA, 20 nt, Artificial Sequence
  RPE65 RNA guide
gcuugagaaucagcccuuuc

SEQ ID NO: 45887 - RNA, 20 nt, Artificial Sequence
  RPE65 RNA guide
gcuugugaaugaaagggcug

SEQ ID NO: 45888 - RNA, 20 nt, Artificial Sequence
  RPE65 RNA guide
gcuuugccuaccuuugauac

SEQ ID NO: 45889 - RNA, 20 nt, Artificial Sequence
  RPE65 RNA guide
ggauugguaucaaagguagg

SEQ ID NO: 45890 - RNA, 20 nt, Artificial Sequence
  RPE65 RNA guide
ggcaaagcaaaucuuuaaac

SEQ ID NO: 45891 - RNA, 20 nt, Artificial Sequence
  RPE65 RNA guide
ggcacuguugauucuuguaa

SEQ ID NO: 45892 - RNA, 20 nt, Artificial Sequence
  RPE65 RNA guide
ggccugcuaugaaucuucag

SEQ ID NO: 45893 - RNA, 20 nt, Artificial Sequence
  RPE65 RNA guide
ggcugauucucaagccacag

SEQ ID NO: 45894 - RNA, 20 nt, Artificial Sequence
  RPE65 RNA guide
ggcuugagaaucagcccuuu

SEQ ID NO: 45895 - RNA, 20 nt, Artificial Sequence
  RPE65 RNA guide
ggcuugugaaugaaagggcu

SEQ ID NO: 45896 - RNA, 20 nt, Artificial Sequence
  RPE65 RNA guide
gggcugauucucaagccaca

SEQ ID NO: 45897 - RNA, 20 nt, Artificial Sequence
  RPE65 RNA guide
gggcuugugaaugaaagggc

SEQ ID NO: 45898 - RNA, 20 nt, Artificial Sequence
  RPE65 RNA guide
gguaggcaaagcaaaucuuu

SEQ ID NO: 45899 - RNA, 20 nt, Artificial Sequence
  RPE65 RNA guide
gguaucaaagguaggcaaag

SEQ ID NO: 45900 - RNA, 20 nt, Artificial Sequence
  RPE65 RNA guide
gguaugcucaguuacaagaa

SEQ ID NO: 45901 - RNA, 20 nt, Artificial Sequence
  RPE65 RNA guide
guaacugagcauaccacaua

SEQ ID NO: 45902 - RNA, 20 nt, Artificial Sequence
  RPE65 RNA guide
guaacuugaaggccugcuau

SEQ ID NO: 45903 - RNA, 20 nt, Artificial Sequence
  RPE65 RNA guide
guaggcaaagcaaaucuuua

SEQ ID NO: 45904 - RNA, 20 nt, Artificial Sequence
  RPE65 RNA guide
guaggcacuguugauucuug

SEQ ID NO: 45905 - RNA, 20 nt, Artificial Sequence
  RPE65 RNA guide
guauauaugugguaugcuca

SEQ ID NO: 45906 - RNA, 20 nt, Artificial Sequence
  RPE65 RNA guide
guaucaaagguaggcaaagc

SEQ ID NO: 45907 - RNA, 20 nt, Artificial Sequence
  RPE65 RNA guide
guaugcucaguuacaagaau

SEQ ID NO: 45908 - RNA, 20 nt, Artificial Sequence
  RPE65 RNA guide
gucuguggcuugagaaucag

SEQ ID NO: 45909 - RNA, 20 nt, Artificial Sequence
  RPE65 RNA guide
gugaaugaaagggcugauuc

SEQ ID NO: 45910 - RNA, 20 nt, Artificial Sequence
  RPE65 RNA guide
gugaucaggauugguaucaa

SEQ ID NO: 45911 - RNA, 20 nt, Artificial Sequence
  RPE65 RNA guide
guggcuugagaaucagcccu

SEQ ID NO: 45912 - RNA, 20 nt, Artificial Sequence
  RPE65 RNA guide
gugguaugcucaguuacaag

SEQ ID NO: 45913 - RNA, 20 nt, Artificial Sequence
  RPE65 RNA guide
guuacaagaaucaacagugc

SEQ ID NO: 45914 - RNA, 20 nt, Artificial Sequence
  RPE65 RNA guide
guucagaaacacaaaugggc

SEQ ID NO: 45915 - RNA, 20 nt, Artificial Sequence
  RPE65 RNA guide
guugauucuuguaacugagc

SEQ ID NO: 45916 - RNA, 20 nt, Artificial Sequence
  RPE65 RNA guide
guuuaaagauuugcuuugcc

SEQ ID NO: 45917 - RNA, 20 nt, Artificial Sequence
  RPE65 RNA guide
guuuuccugaagauucauag

SEQ ID NO: 45918 - RNA, 20 nt, Artificial Sequence
  RPE65 RNA guide
uaaagauuugcuuugccuac

SEQ ID NO: 45919 - RNA, 20 nt, Artificial Sequence
  RPE65 RNA guide
uaacugagcauaccacauau

SEQ ID NO: 45920 - RNA, 20 nt, Artificial Sequence
  RPE65 RNA guide
uaacuugaaggccugcuaug

SEQ ID NO: 45921 - RNA, 20 nt, Artificial Sequence
  RPE65 RNA guide
uaauuucauguaggcacugu

SEQ ID NO: 45922 - RNA, 20 nt, Artificial Sequence
  RPE65 RNA guide
uacaaauuugucuguggcuu

SEQ ID NO: 45923 - RNA, 20 nt, Artificial Sequence
  RPE65 RNA guide
uacaagaaucaacagugccu

SEQ ID NO: 45924 - RNA, 20 nt, Artificial Sequence
  RPE65 RNA guide
uaccuuugauaccaauccug

SEQ ID NO: 45925 - RNA, 20 nt, Artificial Sequence
  RPE65 RNA guide
uaggcacuguugauucuugu

SEQ ID NO: 45926 - RNA, 20 nt, Artificial Sequence
  RPE65 RNA guide
uauacaaauuugucuguggc

SEQ ID NO: 45927 - RNA, 20 nt, Artificial Sequence
  RPE65 RNA guide
uauauaugugguaugcucag

SEQ ID NO: 45928 - RNA, 20 nt, Artificial Sequence
  RPE65 RNA guide
uauaugugguaugcucaguu

SEQ ID NO: 45929 - RNA, 20 nt, Artificial Sequence
  RPE65 RNA guide
uaucaaagguaggcaaagca

SEQ ID NO: 45930 - RNA, 20 nt, Artificial Sequence
  RPE65 RNA guide
uaugaaucuucaggaaaacu

SEQ ID NO: 45931 - RNA, 20 nt, Artificial Sequence
  RPE65 RNA guide
uaugcucaguuacaagaauc

SEQ ID NO: 45932 - RNA, 20 nt, Artificial Sequence
  RPE65 RNA guide
uaugugguaugcucaguuac

SEQ ID NO: 45933 - RNA, 20 nt, Artificial Sequence
  RPE65 RNA guide
uauugugaucaggauuggua

SEQ ID NO: 45934 - RNA, 20 nt, Artificial Sequence
  RPE65 RNA guide
ucaaagguaggcaaagcaaa

SEQ ID NO: 45935 - RNA, 20 nt, Artificial Sequence
  RPE65 RNA guide
ucaacagugccuacaugaaa

SEQ ID NO: 45936 - RNA, 20 nt, Artificial Sequence
  RPE65 RNA guide
ucaagccacagacaaauuug

SEQ ID NO: 45937 - RNA, 20 nt, Artificial Sequence
  RPE65 RNA guide
ucaaguuuaaagauuugcuu

SEQ ID NO: 45938 - RNA, 20 nt, Artificial Sequence
  RPE65 RNA guide
ucacaagcccauuuguguuu

SEQ ID NO: 45939 - RNA, 20 nt, Artificial Sequence
  RPE65 RNA guide
ucagaaacacaaaugggcuu

SEQ ID NO: 45940 - RNA, 20 nt, Artificial Sequence
  RPE65 RNA guide
ucagcccuuucauucacaag

SEQ ID NO: 45941 - RNA, 20 nt, Artificial Sequence
  RPE65 RNA guide
ucaggauugguaucaaaggu

SEQ ID NO: 45942 - RNA, 20 nt, Artificial Sequence
  RPE65 RNA guide
ucaguuacaagaaucaacag

SEQ ID NO: 45943 - RNA, 20 nt, Artificial Sequence
  RPE65 RNA guide
ucauguaggcacuguugauu

SEQ ID NO: 45944 - RNA, 20 nt, Artificial Sequence
  RPE65 RNA guide
ucauucacaagcccauuugu

SEQ ID NO: 45945 - RNA, 20 nt, Artificial Sequence
  RPE65 RNA guide
uccugaagauucauagcagg

SEQ ID NO: 45946 - RNA, 20 nt, Artificial Sequence
  RPE65 RNA guide
ucucaagccacagacaaauu

SEQ ID NO: 45947 - RNA, 20 nt, Artificial Sequence
  RPE65 RNA guide
ucuguggcuugagaaucagc

SEQ ID NO: 45948 - RNA, 20 nt, Artificial Sequence
  RPE65 RNA guide
ucuuguaacugagcauacca

SEQ ID NO: 45949 - RNA, 20 nt, Artificial Sequence
  RPE65 RNA guide
ugaaagggcugauucucaag

SEQ ID NO: 45950 - RNA, 20 nt, Artificial Sequence
  RPE65 RNA guide
ugaagauucauagcaggccu

SEQ ID NO: 45951 - RNA, 20 nt, Artificial Sequence
  RPE65 RNA guide
ugaaggccugcuaugaaucu

SEQ ID NO: 45952 - RNA, 20 nt, Artificial Sequence
  RPE65 RNA guide
ugaaucuucaggaaaacuca

SEQ ID NO: 45953 - RNA, 20 nt, Artificial Sequence
  RPE65 RNA guide
ugaaugaaagggcugauucu

SEQ ID NO: 45954 - RNA, 20 nt, Artificial Sequence
  RPE65 RNA guide
ugagaaucagcccuuucauu

SEQ ID NO: 45955 - RNA, 20 nt, Artificial Sequence
  RPE65 RNA guide
ugaguuuuccugaagauuca

SEQ ID NO: 45956 - RNA, 20 nt, Artificial Sequence
  RPE65 RNA guide
ugauaccaauccugaucaca

SEQ ID NO: 45957 - RNA, 20 nt, Artificial Sequence
  RPE65 RNA guide
ugaucaggauugguaucaaa

SEQ ID NO: 45958 - RNA, 20 nt, Artificial Sequence
  RPE65 RNA guide
ugauucucaagccacagaca

SEQ ID NO: 45959 - RNA, 20 nt, Artificial Sequence
  RPE65 RNA guide
ugauucuuguaacugagcau

SEQ ID NO: 45960 - RNA, 20 nt, Artificial Sequence
  RPE65 RNA guide
ugccuaccuuugauaccaau

SEQ ID NO: 45961 - RNA, 20 nt, Artificial Sequence
  RPE65 RNA guide
ugcuaugaaucuucaggaaa

SEQ ID NO: 45962 - RNA, 20 nt, Artificial Sequence
  RPE65 RNA guide
ugcucaguuacaagaaucaa

SEQ ID NO: 45963 - RNA, 20 nt, Artificial Sequence
  RPE65 RNA guide
ugcuuugccuaccuuugaua

SEQ ID NO: 45964 - RNA, 20 nt, Artificial Sequence
  RPE65 RNA guide
uggcuugagaaucagcccuu

SEQ ID NO: 45965 - RNA, 20 nt, Artificial Sequence
  RPE65 RNA guide
ugggcuugugaaugaaaggg

SEQ ID NO: 45966 - RNA, 20 nt, Artificial Sequence
  RPE65 RNA guide
ugguaucaaagguaggcaaa

SEQ ID NO: 45967 - RNA, 20 nt, Artificial Sequence
  RPE65 RNA guide
ugguaugcucaguuacaaga

SEQ ID NO: 45968 - RNA, 20 nt, Artificial Sequence
  RPE65 RNA guide
uguaacugagcauaccacau

SEQ ID NO: 45969 - RNA, 20 nt, Artificial Sequence
  RPE65 RNA guide
uguaggcacuguugauucuu

SEQ ID NO: 45970 - RNA, 20 nt, Artificial Sequence
  RPE65 RNA guide
uguauauaugugguaugcuc

SEQ ID NO: 45971 - RNA, 20 nt, Artificial Sequence
  RPE65 RNA guide
ugucuguggcuugagaauca

SEQ ID NO: 45972 - RNA, 20 nt, Artificial Sequence
  RPE65 RNA guide
ugugaaugaaagggcugauu

SEQ ID NO: 45973 - RNA, 20 nt, Artificial Sequence
  RPE65 RNA guide
ugugaucaggauugguauca

SEQ ID NO: 45974 - RNA, 20 nt, Artificial Sequence
  RPE65 RNA guide
uguggcuugagaaucagccc

SEQ ID NO: 45975 - RNA, 20 nt, Artificial Sequence
  RPE65 RNA guide
ugugguaugcucaguuacaa

SEQ ID NO: 45976 - RNA, 20 nt, Artificial Sequence
  RPE65 RNA guide
uguucagaaacacaaauggg

SEQ ID NO: 45977 - RNA, 20 nt, Artificial Sequence
  RPE65 RNA guide
uguugauucuuguaacugag

SEQ ID NO: 45978 - RNA, 20 nt, Artificial Sequence
  RPE65 RNA guide
uuaaagauuugcuuugccua

SEQ ID NO: 45979 - RNA, 20 nt, Artificial Sequence
  RPE65 RNA guide
uuaauuucauguaggcacug

SEQ ID NO: 45980 - RNA, 20 nt, Artificial Sequence
  RPE65 RNA guide
uuacaagaaucaacagugcc

SEQ ID NO: 45981 - RNA, 20 nt, Artificial Sequence
  RPE65 RNA guide
uucacaagcccauuuguguu

SEQ ID NO: 45982 - RNA, 20 nt, Artificial Sequence
  RPE65 RNA guide
uucagaaacacaaaugggcu

SEQ ID NO: 45983 - RNA, 20 nt, Artificial Sequence
  RPE65 RNA guide
uucauguaggcacuguugau

SEQ ID NO: 45984 - RNA, 20 nt, Artificial Sequence
  RPE65 RNA guide
uucauucacaagcccauuug

SEQ ID NO: 45985 - RNA, 20 nt, Artificial Sequence
  RPE65 RNA guide
uuccugaagauucauagcag

SEQ ID NO: 45986 - RNA, 20 nt, Artificial Sequence
  RPE65 RNA guide
uucucaagccacagacaaau

SEQ ID NO: 45987 - RNA, 20 nt, Artificial Sequence
  RPE65 RNA guide
uucuuguaacugagcauacc

SEQ ID NO: 45988 - RNA, 20 nt, Artificial Sequence
  RPE65 RNA guide
uugaaggccugcuaugaauc

SEQ ID NO: 45989 - RNA, 20 nt, Artificial Sequence
  RPE65 RNA guide
uugagaaucagcccuuucau

SEQ ID NO: 45990 - RNA, 20 nt, Artificial Sequence
  RPE65 RNA guide
uugaguuuuccugaagauuc

SEQ ID NO: 45991 - RNA, 20 nt, Artificial Sequence
  RPE65 RNA guide
uugauaccaauccugaucac

SEQ ID NO: 45992 - RNA, 20 nt, Artificial Sequence
  RPE65 RNA guide
uugauucuuguaacugagca

SEQ ID NO: 45993 - RNA, 20 nt, Artificial Sequence
  RPE65 RNA guide
uugccuaccuuugauaccaa

SEQ ID NO: 45994 - RNA, 20 nt, Artificial Sequence
  RPE65 RNA guide
uugcuuugccuaccuuugau

SEQ ID NO: 45995 - RNA, 20 nt, Artificial Sequence
  RPE65 RNA guide
uugguaucaaagguaggcaa

SEQ ID NO: 45996 - RNA, 20 nt, Artificial Sequence
  RPE65 RNA guide
uuguaacugagcauaccaca

SEQ ID NO: 45997 - RNA, 20 nt, Artificial Sequence
  RPE65 RNA guide
uuguauauaugugguaugcu

SEQ ID NO: 45998 - RNA, 20 nt, Artificial Sequence
  RPE65 RNA guide
uugucuguggcuugagaauc

SEQ ID NO: 45999 - RNA, 20 nt, Artificial Sequence
  RPE65 RNA guide
uugugaaugaaagggcugau

SEQ ID NO: 46000 - RNA, 20 nt, Artificial Sequence
  RPE65 RNA guide
uugugaucaggauugguauc

SEQ ID NO: 46001 - RNA, 20 nt, Artificial Sequence
  RPE65 RNA guide
uuuaaagauuugcuuugccu

SEQ ID NO: 46002 - RNA, 20 nt, Artificial Sequence
  RPE65 RNA guide
uuucauguaggcacuguuga

SEQ ID NO: 46003 - RNA, 20 nt, Artificial Sequence
  RPE65 RNA guide
uuucauucacaagcccauuu

SEQ ID NO: 46004 - RNA, 20 nt, Artificial Sequence
  RPE65 RNA guide
uuuccugaagauucauagca

SEQ ID NO: 46005 - RNA, 20 nt, Artificial Sequence
  RPE65 RNA guide
uuugauaccaauccugauca

SEQ ID NO: 46006 - RNA, 20 nt, Artificial Sequence
  RPE65 RNA guide
uuugccuaccuuugauacca

SEQ ID NO: 46007 - RNA, 20 nt, Artificial Sequence
  RPE65 RNA guide
uuugcuuugccuaccuuuga

SEQ ID NO: 46008 - RNA, 20 nt, Artificial Sequence
  RPE65 RNA guide
uuuguauauaugugguaugc

SEQ ID NO: 46009 - RNA, 20 nt, Artificial Sequence
  RPE65 RNA guide
uuugucuguggcuugagaau

SEQ ID NO: 46010 - RNA, 20 nt, Artificial Sequence
  RPE65 RNA guide
uuuuccugaagauucauagc

SEQ ID NO: 46011 - RNA, 21 nt, Artificial Sequence
  RPE65 RNA guide
aaacacaaaugggcuugugaa

SEQ ID NO: 46012 - RNA, 21 nt, Artificial Sequence
  RPE65 RNA guide
aaacuugaguuuuccugaaga

SEQ ID NO: 46013 - RNA, 21 nt, Artificial Sequence
  RPE65 RNA guide
aaagauuugcuuugccuaccu

SEQ ID NO: 46014 - RNA, 21 nt, Artificial Sequence
  RPE65 RNA guide
aaagggcugauucucaagcca

SEQ ID NO: 46015 - RNA, 21 nt, Artificial Sequence
  RPE65 RNA guide
aaagguaggcaaagcaaaucu

SEQ ID NO: 46016 - RNA, 21 nt, Artificial Sequence
  RPE65 RNA guide
aaauauugugaucaggauugg

SEQ ID NO: 46017 - RNA, 21 nt, Artificial Sequence
  RPE65 RNA guide
aaaugggcuugugaaugaaag

SEQ ID NO: 46018 - RNA, 21 nt, Artificial Sequence
  RPE65 RNA guide
aaauuugucuguggcuugaga

SEQ ID NO: 46019 - RNA, 21 nt, Artificial Sequence
  RPE65 RNA guide
aacacaaaugggcuugugaau

SEQ ID NO: 46020 - RNA, 21 nt, Artificial Sequence
  RPE65 RNA guide
aacugagcauaccacauauau

SEQ ID NO: 46021 - RNA, 21 nt, Artificial Sequence
  RPE65 RNA guide
aacuugaaggccugcuaugaa

SEQ ID NO: 46022 - RNA, 21 nt, Artificial Sequence
  RPE65 RNA guide
aacuugaguuuuccugaagau

SEQ ID NO: 46023 - RNA, 21 nt, Artificial Sequence
  RPE65 RNA guide
aagaaucaacagugccuacau

SEQ ID NO: 46024 - RNA, 21 nt, Artificial Sequence
  RPE65 RNA guide
aagauucauagcaggccuuca

SEQ ID NO: 46025 - RNA, 21 nt, Artificial Sequence
  RPE65 RNA guide
aagauuugcuuugccuaccuu

SEQ ID NO: 46026 - RNA, 21 nt, Artificial Sequence
  RPE65 RNA guide
aaggccugcuaugaaucuuca

SEQ ID NO: 46027 - RNA, 21 nt, Artificial Sequence
  RPE65 RNA guide
aagggcugauucucaagccac

SEQ ID NO: 46028 - RNA, 21 nt, Artificial Sequence
  RPE65 RNA guide
aagguaggcaaagcaaaucuu

SEQ ID NO: 46029 - RNA, 21 nt, Artificial Sequence
  RPE65 RNA guide
aaguuuaaagauuugcuuugc

SEQ ID NO: 46030 - RNA, 21 nt, Artificial Sequence
  RPE65 RNA guide
aauauugugaucaggauuggu

SEQ ID NO: 46031 - RNA, 21 nt, Artificial Sequence
  RPE65 RNA guide
aaucaacagugccuacaugaa

SEQ ID NO: 46032 - RNA, 21 nt, Artificial Sequence
  RPE65 RNA guide
aaucagcccuuucauucacaa

SEQ ID NO: 46033 - RNA, 21 nt, Artificial Sequence
  RPE65 RNA guide
aaugaaagggcugauucucaa

SEQ ID NO: 46034 - RNA, 21 nt, Artificial Sequence
  RPE65 RNA guide
aaugggcuugugaaugaaagg

SEQ ID NO: 46035 - RNA, 21 nt, Artificial Sequence
  RPE65 RNA guide
aauuaauuucauguaggcacu

SEQ ID NO: 46036 - RNA, 21 nt, Artificial Sequence
  RPE65 RNA guide
aauuucauguaggcacuguug

SEQ ID NO: 46037 - RNA, 21 nt, Artificial Sequence
  RPE65 RNA guide
aauuugucuguggcuugagaa

SEQ ID NO: 46038 - RNA, 21 nt, Artificial Sequence
  RPE65 RNA guide
acaaaugggcuugugaaugaa

SEQ ID NO: 46039 - RNA, 21 nt, Artificial Sequence
  RPE65 RNA guide
acaaauuugucuguggcuuga

SEQ ID NO: 46040 - RNA, 21 nt, Artificial Sequence
  RPE65 RNA guide
acaagaaucaacagugccuac

SEQ ID NO: 46041 - RNA, 21 nt, Artificial Sequence
  RPE65 RNA guide
acaagcccauuuguguuucug

SEQ ID NO: 46042 - RNA, 21 nt, Artificial Sequence
  RPE65 RNA guide
acacaaaugggcuugugaaug

SEQ ID NO: 46043 - RNA, 21 nt, Artificial Sequence
  RPE65 RNA guide
acauauauacaaauuugucug

SEQ ID NO: 46044 - RNA, 21 nt, Artificial Sequence
  RPE65 RNA guide
accuuugauaccaauccugau

SEQ ID NO: 46045 - RNA, 21 nt, Artificial Sequence
  RPE65 RNA guide
acucaaguuuaaagauuugcu

SEQ ID NO: 46046 - RNA, 21 nt, Artificial Sequence
  RPE65 RNA guide
acugagcauaccacauauaua

SEQ ID NO: 46047 - RNA, 21 nt, Artificial Sequence
  RPE65 RNA guide
acuguugauucuuguaacuga

SEQ ID NO: 46048 - RNA, 21 nt, Artificial Sequence
  RPE65 RNA guide
acuugaaggccugcuaugaau

SEQ ID NO: 46049 - RNA, 21 nt, Artificial Sequence
  RPE65 RNA guide
acuugaguuuuccugaagauu

SEQ ID NO: 46050 - RNA, 21 nt, Artificial Sequence
  RPE65 RNA guide
agaaacacaaaugggcuugug

SEQ ID NO: 46051 - RNA, 21 nt, Artificial Sequence
  RPE65 RNA guide
agaaucaacagugccuacaug

SEQ ID NO: 46052 - RNA, 21 nt, Artificial Sequence
  RPE65 RNA guide
agaaucagcccuuucauucac

SEQ ID NO: 46053 - RNA, 21 nt, Artificial Sequence
  RPE65 RNA guide
agauucauagcaggccuucaa

SEQ ID NO: 46054 - RNA, 21 nt, Artificial Sequence
  RPE65 RNA guide
agauuugcuuugccuaccuuu

SEQ ID NO: 46055 - RNA, 21 nt, Artificial Sequence
  RPE65 RNA guide
agccacagacaaauuuguaua

SEQ ID NO: 46056 - RNA, 21 nt, Artificial Sequence
  RPE65 RNA guide
agcccuuucauucacaagccc

SEQ ID NO: 46057 - RNA, 21 nt, Artificial Sequence
  RPE65 RNA guide
aggauugguaucaaagguagg

SEQ ID NO: 46058 - RNA, 21 nt, Artificial Sequence
  RPE65 RNA guide
aggcaaagcaaaucuuuaaac

SEQ ID NO: 46059 - RNA, 21 nt, Artificial Sequence
  RPE65 RNA guide
aggcacuguugauucuuguaa

SEQ ID NO: 46060 - RNA, 21 nt, Artificial Sequence
  RPE65 RNA guide
aggccugcuaugaaucuucag

SEQ ID NO: 46061 - RNA, 21 nt, Artificial Sequence
  RPE65 RNA guide
agggcugauucucaagccaca

SEQ ID NO: 46062 - RNA, 21 nt, Artificial Sequence
  RPE65 RNA guide
agguaggcaaagcaaaucuuu

SEQ ID NO: 46063 - RNA, 21 nt, Artificial Sequence
  RPE65 RNA guide
aguuacaagaaucaacagugc

SEQ ID NO: 46064 - RNA, 21 nt, Artificial Sequence
  RPE65 RNA guide
aguuuaaagauuugcuuugcc

SEQ ID NO: 46065 - RNA, 21 nt, Artificial Sequence
  RPE65 RNA guide
aguuuuccugaagauucauag

SEQ ID NO: 46066 - RNA, 21 nt, Artificial Sequence
  RPE65 RNA guide
auacaaauuugucuguggcuu

SEQ ID NO: 46067 - RNA, 21 nt, Artificial Sequence
  RPE65 RNA guide
auauacaaauuugucuguggc

SEQ ID NO: 46068 - RNA, 21 nt, Artificial Sequence
  RPE65 RNA guide
auauaugugguaugcucaguu

SEQ ID NO: 46069 - RNA, 21 nt, Artificial Sequence
  RPE65 RNA guide
auaugugguaugcucaguuac

SEQ ID NO: 46070 - RNA, 21 nt, Artificial Sequence
  RPE65 RNA guide
auauugugaucaggauuggua

SEQ ID NO: 46071 - RNA, 21 nt, Artificial Sequence
  RPE65 RNA guide
aucaaagguaggcaaagcaaa

SEQ ID NO: 46072 - RNA, 21 nt, Artificial Sequence
  RPE65 RNA guide
aucaacagugccuacaugaaa

SEQ ID NO: 46073 - RNA, 21 nt, Artificial Sequence
  RPE65 RNA guide
aucagcccuuucauucacaag

SEQ ID NO: 46074 - RNA, 21 nt, Artificial Sequence
  RPE65 RNA guide
aucaggauugguaucaaaggu

SEQ ID NO: 46075 - RNA, 21 nt, Artificial Sequence
  RPE65 RNA guide
augaaagggcugauucucaag

SEQ ID NO: 46076 - RNA, 21 nt, Artificial Sequence
  RPE65 RNA guide
augaaucuucaggaaaacuca

SEQ ID NO: 46077 - RNA, 21 nt, Artificial Sequence
  RPE65 RNA guide
augcucaguuacaagaaucaa

SEQ ID NO: 46078 - RNA, 21 nt, Artificial Sequence
  RPE65 RNA guide
augggcuugugaaugaaaggg

SEQ ID NO: 46079 - RNA, 21 nt, Artificial Sequence
  RPE65 RNA guide
auguaggcacuguugauucuu

SEQ ID NO: 46080 - RNA, 21 nt, Artificial Sequence
  RPE65 RNA guide
augugguaugcucaguuacaa

SEQ ID NO: 46081 - RNA, 21 nt, Artificial Sequence
  RPE65 RNA guide
auuaauuucauguaggcacug

SEQ ID NO: 46082 - RNA, 21 nt, Artificial Sequence
  RPE65 RNA guide
auucacaagcccauuuguguu

SEQ ID NO: 46083 - RNA, 21 nt, Artificial Sequence
  RPE65 RNA guide
auucucaagccacagacaaau

SEQ ID NO: 46084 - RNA, 21 nt, Artificial Sequence
  RPE65 RNA guide
auucuuguaacugagcauacc

SEQ ID NO: 46085 - RNA, 21 nt, Artificial Sequence
  RPE65 RNA guide
auugguaucaaagguaggcaa

SEQ ID NO: 46086 - RNA, 21 nt, Artificial Sequence
  RPE65 RNA guide
auugugaucaggauugguauc

SEQ ID NO: 46087 - RNA, 21 nt, Artificial Sequence
  RPE65 RNA guide
auuucauguaggcacuguuga

SEQ ID NO: 46088 - RNA, 21 nt, Artificial Sequence
  RPE65 RNA guide
auuugcuuugccuaccuuuga

SEQ ID NO: 46089 - RNA, 21 nt, Artificial Sequence
  RPE65 RNA guide
auuuguauauaugugguaugc

SEQ ID NO: 46090 - RNA, 21 nt, Artificial Sequence
  RPE65 RNA guide
auuugucuguggcuugagaau

SEQ ID NO: 46091 - RNA, 21 nt, Artificial Sequence
  RPE65 RNA guide
caaagguaggcaaagcaaauc

SEQ ID NO: 46092 - RNA, 21 nt, Artificial Sequence
  RPE65 RNA guide
caaaugggcuugugaaugaaa

SEQ ID NO: 46093 - RNA, 21 nt, Artificial Sequence
  RPE65 RNA guide
caaauuugucuguggcuugag

SEQ ID NO: 46094 - RNA, 21 nt, Artificial Sequence
  RPE65 RNA guide
caacagugccuacaugaaauu

SEQ ID NO: 46095 - RNA, 21 nt, Artificial Sequence
  RPE65 RNA guide
caagaaucaacagugccuaca

SEQ ID NO: 46096 - RNA, 21 nt, Artificial Sequence
  RPE65 RNA guide
caagccacagacaaauuugua

SEQ ID NO: 46097 - RNA, 21 nt, Artificial Sequence
  RPE65 RNA guide
caagcccauuuguguuucuga

SEQ ID NO: 46098 - RNA, 21 nt, Artificial Sequence
  RPE65 RNA guide
caaguuuaaagauuugcuuug

SEQ ID NO: 46099 - RNA, 21 nt, Artificial Sequence
  RPE65 RNA guide
cacaaaugggcuugugaauga

SEQ ID NO: 46100 - RNA, 21 nt, Artificial Sequence
  RPE65 RNA guide
cacaagcccauuuguguuucu

SEQ ID NO: 46101 - RNA, 21 nt, Artificial Sequence
  RPE65 RNA guide
cacagacaaauuuguauauau

SEQ ID NO: 46102 - RNA, 21 nt, Artificial Sequence
  RPE65 RNA guide
cacauauauacaaauuugucu

SEQ ID NO: 46103 - RNA, 21 nt, Artificial Sequence
  RPE65 RNA guide
cacuguugauucuuguaacug

SEQ ID NO: 46104 - RNA, 21 nt, Artificial Sequence
  RPE65 RNA guide
cagaaacacaaaugggcuugu

SEQ ID NO: 46105 - RNA, 21 nt, Artificial Sequence
  RPE65 RNA guide
cagcccuuucauucacaagcc

SEQ ID NO: 46106 - RNA, 21 nt, Artificial Sequence
  RPE65 RNA guide
caggauugguaucaaagguag

SEQ ID NO: 46107 - RNA, 21 nt, Artificial Sequence
  RPE65 RNA guide
cagugccuacaugaaauuaau

SEQ ID NO: 46108 - RNA, 21 nt, Artificial Sequence
  RPE65 RNA guide
caguuacaagaaucaacagug

SEQ ID NO: 46109 - RNA, 21 nt, Artificial Sequence
  RPE65 RNA guide
cauaauuaauuucauguaggc

SEQ ID NO: 46110 - RNA, 21 nt, Artificial Sequence
  RPE65 RNA guide
cauauauacaaauuugucugu

SEQ ID NO: 46111 - RNA, 21 nt, Artificial Sequence
  RPE65 RNA guide
cauguaggcacuguugauucu

SEQ ID NO: 46112 - RNA, 21 nt, Artificial Sequence
  RPE65 RNA guide
cauucacaagcccauuugugu

SEQ ID NO: 46113 - RNA, 21 nt, Artificial Sequence
  RPE65 RNA guide
ccacagacaaauuuguauaua

SEQ ID NO: 46114 - RNA, 21 nt, Artificial Sequence
  RPE65 RNA guide
ccacauauauacaaauuuguc

SEQ ID NO: 46115 - RNA, 21 nt, Artificial Sequence
  RPE65 RNA guide
cccuuucauucacaagcccau

SEQ ID NO: 46116 - RNA, 21 nt, Artificial Sequence
  RPE65 RNA guide
ccuaccuuugauaccaauccu

SEQ ID NO: 46117 - RNA, 21 nt, Artificial Sequence
  RPE65 RNA guide
ccugaagauucauagcaggcc

SEQ ID NO: 46118 - RNA, 21 nt, Artificial Sequence
  RPE65 RNA guide
ccugcuaugaaucuucaggaa

SEQ ID NO: 46119 - RNA, 21 nt, Artificial Sequence
  RPE65 RNA guide
ccuuucauucacaagcccauu

SEQ ID NO: 46120 - RNA, 21 nt, Artificial Sequence
  RPE65 RNA guide
ccuuugauaccaauccugauc

SEQ ID NO: 46121 - RNA, 21 nt, Artificial Sequence
  RPE65 RNA guide
cuaccuuugauaccaauccug

SEQ ID NO: 46122 - RNA, 21 nt, Artificial Sequence
  RPE65 RNA guide
cuaugaaucuucaggaaaacu

SEQ ID NO: 46123 - RNA, 21 nt, Artificial Sequence
  RPE65 RNA guide
cucaagccacagacaaauuug

SEQ ID NO: 46124 - RNA, 21 nt, Artificial Sequence
  RPE65 RNA guide
cucaaguuuaaagauuugcuu

SEQ ID NO: 46125 - RNA, 21 nt, Artificial Sequence
  RPE65 RNA guide
cucaguuacaagaaucaacag

SEQ ID NO: 46126 - RNA, 21 nt, Artificial Sequence
  RPE65 RNA guide
cugaagauucauagcaggccu

SEQ ID NO: 46127 - RNA, 21 nt, Artificial Sequence
  RPE65 RNA guide
cugagcauaccacauauauac

SEQ ID NO: 46128 - RNA, 21 nt, Artificial Sequence
  RPE65 RNA guide
cugauucucaagccacagaca

SEQ ID NO: 46129 - RNA, 21 nt, Artificial Sequence
  RPE65 RNA guide
cugcuaugaaucuucaggaaa

SEQ ID NO: 46130 - RNA, 21 nt, Artificial Sequence
  RPE65 RNA guide
cuguggcuugagaaucagccc

SEQ ID NO: 46131 - RNA, 21 nt, Artificial Sequence
  RPE65 RNA guide
cuguucagaaacacaaauggg

SEQ ID NO: 46132 - RNA, 21 nt, Artificial Sequence
  RPE65 RNA guide
cuguugauucuuguaacugag

SEQ ID NO: 46133 - RNA, 21 nt, Artificial Sequence
  RPE65 RNA guide
cuucaggaaaacucaaguuua

SEQ ID NO: 46134 - RNA, 21 nt, Artificial Sequence
  RPE65 RNA guide
cuugaaggccugcuaugaauc

SEQ ID NO: 46135 - RNA, 21 nt, Artificial Sequence
  RPE65 RNA guide
cuugagaaucagcccuuucau

SEQ ID NO: 46136 - RNA, 21 nt, Artificial Sequence
  RPE65 RNA guide
cuugaguuuuccugaagauuc

SEQ ID NO: 46137 - RNA, 21 nt, Artificial Sequence
  RPE65 RNA guide
cuuguaacugagcauaccaca

SEQ ID NO: 46138 - RNA, 21 nt, Artificial Sequence
  RPE65 RNA guide
cuugugaaugaaagggcugau

SEQ ID NO: 46139 - RNA, 21 nt, Artificial Sequence
  RPE65 RNA guide
cuuuaaacuugaguuuuccug

SEQ ID NO: 46140 - RNA, 21 nt, Artificial Sequence
  RPE65 RNA guide
cuuucauucacaagcccauuu

SEQ ID NO: 46141 - RNA, 21 nt, Artificial Sequence
  RPE65 RNA guide
cuuugauaccaauccugauca

SEQ ID NO: 46142 - RNA, 21 nt, Artificial Sequence
  RPE65 RNA guide
cuuugccuaccuuugauacca

SEQ ID NO: 46143 - RNA, 21 nt, Artificial Sequence
  RPE65 RNA guide
gaaacacaaaugggcuuguga

SEQ ID NO: 46144 - RNA, 21 nt, Artificial Sequence
  RPE65 RNA guide
gaaagggcugauucucaagcc

SEQ ID NO: 46145 - RNA, 21 nt, Artificial Sequence
  RPE65 RNA guide
gaagauucauagcaggccuuc

SEQ ID NO: 46146 - RNA, 21 nt, Artificial Sequence
  RPE65 RNA guide
gaaggccugcuaugaaucuuc

SEQ ID NO: 46147 - RNA, 21 nt, Artificial Sequence
  RPE65 RNA guide
gaaucaacagugccuacauga

SEQ ID NO: 46148 - RNA, 21 nt, Artificial Sequence
  RPE65 RNA guide
gaaucagcccuuucauucaca

SEQ ID NO: 46149 - RNA, 21 nt, Artificial Sequence
  RPE65 RNA guide
gaaucuucaggaaaacucaag

SEQ ID NO: 46150 - RNA, 21 nt, Artificial Sequence
  RPE65 RNA guide
gaaugaaagggcugauucuca

SEQ ID NO: 46151 - RNA, 21 nt, Artificial Sequence
  RPE65 RNA guide
gagaaucagcccuuucauuca

SEQ ID NO: 46152 - RNA, 21 nt, Artificial Sequence
  RPE65 RNA guide
gaguuuuccugaagauucaua

SEQ ID NO: 46153 - RNA, 21 nt, Artificial Sequence
  RPE65 RNA guide
gauaccaauccugaucacaau

SEQ ID NO: 46154 - RNA, 21 nt, Artificial Sequence
  RPE65 RNA guide
gaucaggauugguaucaaagg

SEQ ID NO: 46155 - RNA, 21 nt, Artificial Sequence
  RPE65 RNA guide
gauucauagcaggccuucaag

SEQ ID NO: 46156 - RNA, 21 nt, Artificial Sequence
  RPE65 RNA guide
gauucucaagccacagacaaa

SEQ ID NO: 46157 - RNA, 21 nt, Artificial Sequence
  RPE65 RNA guide
gauucuuguaacugagcauac

SEQ ID NO: 46158 - RNA, 21 nt, Artificial Sequence
  RPE65 RNA guide
gauugguaucaaagguaggca

SEQ ID NO: 46159 - RNA, 21 nt, Artificial Sequence
  RPE65 RNA guide
gauuugcuuugccuaccuuug

SEQ ID NO: 46160 - RNA, 21 nt, Artificial Sequence
  RPE65 RNA guide
gcaaagcaaaucuuuaaacuu

SEQ ID NO: 46161 - RNA, 21 nt, Artificial Sequence
  RPE65 RNA guide
gcaaaucuuuaaacuugaguu

SEQ ID NO: 46162 - RNA, 21 nt, Artificial Sequence
  RPE65 RNA guide
gcacuguugauucuuguaacu

SEQ ID NO: 46163 - RNA, 21 nt, Artificial Sequence
  RPE65 RNA guide
gccacagacaaauuuguauau

SEQ ID NO: 46164 - RNA, 21 nt, Artificial Sequence
  RPE65 RNA guide
gcccuuucauucacaagccca

SEQ ID NO: 46165 - RNA, 21 nt, Artificial Sequence
  RPE65 RNA guide
gccuaccuuugauaccaaucc

SEQ ID NO: 46166 - RNA, 21 nt, Artificial Sequence
  RPE65 RNA guide
gccugcuaugaaucuucagga

SEQ ID NO: 46167 - RNA, 21 nt, Artificial Sequence
  RPE65 RNA guide
gcuaugaaucuucaggaaaac

SEQ ID NO: 46168 - RNA, 21 nt, Artificial Sequence
  RPE65 RNA guide
gcucaguuacaagaaucaaca

SEQ ID NO: 46169 - RNA, 21 nt, Artificial Sequence
  RPE65 RNA guide
gcugauucucaagccacagac

SEQ ID NO: 46170 - RNA, 21 nt, Artificial Sequence
  RPE65 RNA guide
gcuugagaaucagcccuuuca

SEQ ID NO: 46171 - RNA, 21 nt, Artificial Sequence
  RPE65 RNA guide
gcuugugaaugaaagggcuga

SEQ ID NO: 46172 - RNA, 21 nt, Artificial Sequence
  RPE65 RNA guide
gcuuugccuaccuuugauacc

SEQ ID NO: 46173 - RNA, 21 nt, Artificial Sequence
  RPE65 RNA guide
ggaaaacucaaguuuaaagau

SEQ ID NO: 46174 - RNA, 21 nt, Artificial Sequence
  RPE65 RNA guide
ggauugguaucaaagguaggc

SEQ ID NO: 46175 - RNA, 21 nt, Artificial Sequence
  RPE65 RNA guide
ggcaaagcaaaucuuuaaacu

SEQ ID NO: 46176 - RNA, 21 nt, Artificial Sequence
  RPE65 RNA guide
ggcacuguugauucuuguaac

SEQ ID NO: 46177 - RNA, 21 nt, Artificial Sequence
  RPE65 RNA guide
ggccugcuaugaaucuucagg

SEQ ID NO: 46178 - RNA, 21 nt, Artificial Sequence
  RPE65 RNA guide
ggcugauucucaagccacaga

SEQ ID NO: 46179 - RNA, 21 nt, Artificial Sequence
  RPE65 RNA guide
ggcuugagaaucagcccuuuc

SEQ ID NO: 46180 - RNA, 21 nt, Artificial Sequence
  RPE65 RNA guide
ggcuugugaaugaaagggcug

SEQ ID NO: 46181 - RNA, 21 nt, Artificial Sequence
  RPE65 RNA guide
gggcugauucucaagccacag

SEQ ID NO: 46182 - RNA, 21 nt, Artificial Sequence
  RPE65 RNA guide
gggcuugugaaugaaagggcu

SEQ ID NO: 46183 - RNA, 21 nt, Artificial Sequence
  RPE65 RNA guide
gguaggcaaagcaaaucuuua

SEQ ID NO: 46184 - RNA, 21 nt, Artificial Sequence
  RPE65 RNA guide
gguaucaaagguaggcaaagc

SEQ ID NO: 46185 - RNA, 21 nt, Artificial Sequence
  RPE65 RNA guide
gguaugcucaguuacaagaau

SEQ ID NO: 46186 - RNA, 21 nt, Artificial Sequence
  RPE65 RNA guide
guaacugagcauaccacauau

SEQ ID NO: 46187 - RNA, 21 nt, Artificial Sequence
  RPE65 RNA guide
guaacuugaaggccugcuaug

SEQ ID NO: 46188 - RNA, 21 nt, Artificial Sequence
  RPE65 RNA guide
guaggcaaagcaaaucuuuaa

SEQ ID NO: 46189 - RNA, 21 nt, Artificial Sequence
  RPE65 RNA guide
guaggcacuguugauucuugu

SEQ ID NO: 46190 - RNA, 21 nt, Artificial Sequence
  RPE65 RNA guide
guauauaugugguaugcucag

SEQ ID NO: 46191 - RNA, 21 nt, Artificial Sequence
  RPE65 RNA guide
guaucaaagguaggcaaagca

SEQ ID NO: 46192 - RNA, 21 nt, Artificial Sequence
  RPE65 RNA guide
guaugcucaguuacaagaauc

SEQ ID NO: 46193 - RNA, 21 nt, Artificial Sequence
  RPE65 RNA guide
gucuguggcuugagaaucagc

SEQ ID NO: 46194 - RNA, 21 nt, Artificial Sequence
  RPE65 RNA guide
gugaaugaaagggcugauucu

SEQ ID NO: 46195 - RNA, 21 nt, Artificial Sequence
  RPE65 RNA guide
gugaucaggauugguaucaaa

SEQ ID NO: 46196 - RNA, 21 nt, Artificial Sequence
  RPE65 RNA guide
guggcuugagaaucagcccuu

SEQ ID NO: 46197 - RNA, 21 nt, Artificial Sequence
  RPE65 RNA guide
gugguaugcucaguuacaaga

SEQ ID NO: 46198 - RNA, 21 nt, Artificial Sequence
  RPE65 RNA guide
guuacaagaaucaacagugcc

SEQ ID NO: 46199 - RNA, 21 nt, Artificial Sequence
  RPE65 RNA guide
guucagaaacacaaaugggcu

SEQ ID NO: 46200 - RNA, 21 nt, Artificial Sequence
  RPE65 RNA guide
guugauucuuguaacugagca

SEQ ID NO: 46201 - RNA, 21 nt, Artificial Sequence
  RPE65 RNA guide
guuuaaagauuugcuuugccu

SEQ ID NO: 46202 - RNA, 21 nt, Artificial Sequence
  RPE65 RNA guide
guuuuccugaagauucauagc

SEQ ID NO: 46203 - RNA, 21 nt, Artificial Sequence
  RPE65 RNA guide
uaaacuugaguuuuccugaag

SEQ ID NO: 46204 - RNA, 21 nt, Artificial Sequence
  RPE65 RNA guide
uaaagauuugcuuugccuacc

SEQ ID NO: 46205 - RNA, 21 nt, Artificial Sequence
  RPE65 RNA guide
uaacugagcauaccacauaua

SEQ ID NO: 46206 - RNA, 21 nt, Artificial Sequence
  RPE65 RNA guide
uaacuugaaggccugcuauga

SEQ ID NO: 46207 - RNA, 21 nt, Artificial Sequence
  RPE65 RNA guide
uaauuucauguaggcacuguu

SEQ ID NO: 46208 - RNA, 21 nt, Artificial Sequence
  RPE65 RNA guide
uacaaauuugucuguggcuug

SEQ ID NO: 46209 - RNA, 21 nt, Artificial Sequence
  RPE65 RNA guide
uacaagaaucaacagugccua

SEQ ID NO: 46210 - RNA, 21 nt, Artificial Sequence
  RPE65 RNA guide
uaccuuugauaccaauccuga

SEQ ID NO: 46211 - RNA, 21 nt, Artificial Sequence
  RPE65 RNA guide
uaggcaaagcaaaucuuuaaa

SEQ ID NO: 46212 - RNA, 21 nt, Artificial Sequence
  RPE65 RNA guide
uaggcacuguugauucuugua

SEQ ID NO: 46213 - RNA, 21 nt, Artificial Sequence
  RPE65 RNA guide
uauacaaauuugucuguggcu

SEQ ID NO: 46214 - RNA, 21 nt, Artificial Sequence
  RPE65 RNA guide
uauauacaaauuugucugugg

SEQ ID NO: 46215 - RNA, 21 nt, Artificial Sequence
  RPE65 RNA guide
uauauaugugguaugcucagu

SEQ ID NO: 46216 - RNA, 21 nt, Artificial Sequence
  RPE65 RNA guide
uauaugugguaugcucaguua

SEQ ID NO: 46217 - RNA, 21 nt, Artificial Sequence
  RPE65 RNA guide
uaucaaagguaggcaaagcaa

SEQ ID NO: 46218 - RNA, 21 nt, Artificial Sequence
  RPE65 RNA guide
uaugaaucuucaggaaaacuc

SEQ ID NO: 46219 - RNA, 21 nt, Artificial Sequence
  RPE65 RNA guide
uaugcucaguuacaagaauca

SEQ ID NO: 46220 - RNA, 21 nt, Artificial Sequence
  RPE65 RNA guide
uaugugguaugcucaguuaca

SEQ ID NO: 46221 - RNA, 21 nt, Artificial Sequence
  RPE65 RNA guide
uauugugaucaggauugguau

SEQ ID NO: 46222 - RNA, 21 nt, Artificial Sequence
  RPE65 RNA guide
ucaaagguaggcaaagcaaau

SEQ ID NO: 46223 - RNA, 21 nt, Artificial Sequence
  RPE65 RNA guide
ucaacagugccuacaugaaau

SEQ ID NO: 46224 - RNA, 21 nt, Artificial Sequence
  RPE65 RNA guide
ucaagccacagacaaauuugu

SEQ ID NO: 46225 - RNA, 21 nt, Artificial Sequence
  RPE65 RNA guide
ucaaguuuaaagauuugcuuu

SEQ ID NO: 46226 - RNA, 21 nt, Artificial Sequence
  RPE65 RNA guide
ucacaagcccauuuguguuuc

SEQ ID NO: 46227 - RNA, 21 nt, Artificial Sequence
  RPE65 RNA guide
ucagaaacacaaaugggcuug

SEQ ID NO: 46228 - RNA, 21 nt, Artificial Sequence
  RPE65 RNA guide
ucagcccuuucauucacaagc

SEQ ID NO: 46229 - RNA, 21 nt, Artificial Sequence
  RPE65 RNA guide
ucaggauugguaucaaaggua

SEQ ID NO: 46230 - RNA, 21 nt, Artificial Sequence
  RPE65 RNA guide
ucaguuacaagaaucaacagu

SEQ ID NO: 46231 - RNA, 21 nt, Artificial Sequence
  RPE65 RNA guide
ucauguaggcacuguugauuc

SEQ ID NO: 46232 - RNA, 21 nt, Artificial Sequence
  RPE65 RNA guide
ucauucacaagcccauuugug

SEQ ID NO: 46233 - RNA, 21 nt, Artificial Sequence
  RPE65 RNA guide
uccugaagauucauagcaggc

SEQ ID NO: 46234 - RNA, 21 nt, Artificial Sequence
  RPE65 RNA guide
ucucaagccacagacaaauuu

SEQ ID NO: 46235 - RNA, 21 nt, Artificial Sequence
  RPE65 RNA guide
ucuguggcuugagaaucagcc

SEQ ID NO: 46236 - RNA, 21 nt, Artificial Sequence
  RPE65 RNA guide
ucuucaggaaaacucaaguuu

SEQ ID NO: 46237 - RNA, 21 nt, Artificial Sequence
  RPE65 RNA guide
ucuuguaacugagcauaccac

SEQ ID NO: 46238 - RNA, 21 nt, Artificial Sequence
  RPE65 RNA guide
ucuuuaaacuugaguuuuccu

SEQ ID NO: 46239 - RNA, 21 nt, Artificial Sequence
  RPE65 RNA guide
ugaaagggcugauucucaagc

SEQ ID NO: 46240 - RNA, 21 nt, Artificial Sequence
  RPE65 RNA guide
ugaagauucauagcaggccuu

SEQ ID NO: 46241 - RNA, 21 nt, Artificial Sequence
  RPE65 RNA guide
ugaaggccugcuaugaaucuu

SEQ ID NO: 46242 - RNA, 21 nt, Artificial Sequence
  RPE65 RNA guide
ugaaucuucaggaaaacucaa

SEQ ID NO: 46243 - RNA, 21 nt, Artificial Sequence
  RPE65 RNA guide
ugaaugaaagggcugauucuc

SEQ ID NO: 46244 - RNA, 21 nt, Artificial Sequence
  RPE65 RNA guide
ugagaaucagcccuuucauuc

SEQ ID NO: 46245 - RNA, 21 nt, Artificial Sequence
  RPE65 RNA guide
ugaguuuuccugaagauucau

SEQ ID NO: 46246 - RNA, 21 nt, Artificial Sequence
  RPE65 RNA guide
ugauaccaauccugaucacaa

SEQ ID NO: 46247 - RNA, 21 nt, Artificial Sequence
  RPE65 RNA guide
ugaucaggauugguaucaaag

SEQ ID NO: 46248 - RNA, 21 nt, Artificial Sequence
  RPE65 RNA guide
ugauucucaagccacagacaa

SEQ ID NO: 46249 - RNA, 21 nt, Artificial Sequence
  RPE65 RNA guide
ugauucuuguaacugagcaua

SEQ ID NO: 46250 - RNA, 21 nt, Artificial Sequence
  RPE65 RNA guide
ugccuaccuuugauaccaauc

SEQ ID NO: 46251 - RNA, 21 nt, Artificial Sequence
  RPE65 RNA guide
ugcuaugaaucuucaggaaaa

SEQ ID NO: 46252 - RNA, 21 nt, Artificial Sequence
  RPE65 RNA guide
ugcucaguuacaagaaucaac

SEQ ID NO: 46253 - RNA, 21 nt, Artificial Sequence
  RPE65 RNA guide
ugcuuugccuaccuuugauac

SEQ ID NO: 46254 - RNA, 21 nt, Artificial Sequence
  RPE65 RNA guide
uggcuugagaaucagcccuuu

SEQ ID NO: 46255 - RNA, 21 nt, Artificial Sequence
  RPE65 RNA guide
ugggcuugugaaugaaagggc

SEQ ID NO: 46256 - RNA, 21 nt, Artificial Sequence
  RPE65 RNA guide
ugguaucaaagguaggcaaag

SEQ ID NO: 46257 - RNA, 21 nt, Artificial Sequence
  RPE65 RNA guide
ugguaugcucaguuacaagaa

SEQ ID NO: 46258 - RNA, 21 nt, Artificial Sequence
  RPE65 RNA guide
uguaacugagcauaccacaua

SEQ ID NO: 46259 - RNA, 21 nt, Artificial Sequence
  RPE65 RNA guide
uguaggcacuguugauucuug

SEQ ID NO: 46260 - RNA, 21 nt, Artificial Sequence
  RPE65 RNA guide
uguauauaugugguaugcuca

SEQ ID NO: 46261 - RNA, 21 nt, Artificial Sequence
  RPE65 RNA guide
ugucuguggcuugagaaucag

SEQ ID NO: 46262 - RNA, 21 nt, Artificial Sequence
  RPE65 RNA guide
ugugaaugaaagggcugauuc

SEQ ID NO: 46263 - RNA, 21 nt, Artificial Sequence
  RPE65 RNA guide
ugugaucaggauugguaucaa

SEQ ID NO: 46264 - RNA, 21 nt, Artificial Sequence
  RPE65 RNA guide
uguggcuugagaaucagcccu

SEQ ID NO: 46265 - RNA, 21 nt, Artificial Sequence
  RPE65 RNA guide
ugugguaugcucaguuacaag

SEQ ID NO: 46266 - RNA, 21 nt, Artificial Sequence
  RPE65 RNA guide
uguucagaaacacaaaugggc

SEQ ID NO: 46267 - RNA, 21 nt, Artificial Sequence
  RPE65 RNA guide
uguugauucuuguaacugagc

SEQ ID NO: 46268 - RNA, 21 nt, Artificial Sequence
  RPE65 RNA guide
uuaaagauuugcuuugccuac

SEQ ID NO: 46269 - RNA, 21 nt, Artificial Sequence
  RPE65 RNA guide
uuaauuucauguaggcacugu

SEQ ID NO: 46270 - RNA, 21 nt, Artificial Sequence
  RPE65 RNA guide
uuacaagaaucaacagugccu

SEQ ID NO: 46271 - RNA, 21 nt, Artificial Sequence
  RPE65 RNA guide
uucacaagcccauuuguguuu

SEQ ID NO: 46272 - RNA, 21 nt, Artificial Sequence
  RPE65 RNA guide
uucagaaacacaaaugggcuu

SEQ ID NO: 46273 - RNA, 21 nt, Artificial Sequence
  RPE65 RNA guide
uucauguaggcacuguugauu

SEQ ID NO: 46274 - RNA, 21 nt, Artificial Sequence
  RPE65 RNA guide
uucauucacaagcccauuugu

SEQ ID NO: 46275 - RNA, 21 nt, Artificial Sequence
  RPE65 RNA guide
uuccugaagauucauagcagg

SEQ ID NO: 46276 - RNA, 21 nt, Artificial Sequence
  RPE65 RNA guide
uucucaagccacagacaaauu

SEQ ID NO: 46277 - RNA, 21 nt, Artificial Sequence
  RPE65 RNA guide
uucuuguaacugagcauacca

SEQ ID NO: 46278 - RNA, 21 nt, Artificial Sequence
  RPE65 RNA guide
uugaaggccugcuaugaaucu

SEQ ID NO: 46279 - RNA, 21 nt, Artificial Sequence
  RPE65 RNA guide
uugagaaucagcccuuucauu

SEQ ID NO: 46280 - RNA, 21 nt, Artificial Sequence
  RPE65 RNA guide
uugaguuuuccugaagauuca

SEQ ID NO: 46281 - RNA, 21 nt, Artificial Sequence
  RPE65 RNA guide
uugauaccaauccugaucaca

SEQ ID NO: 46282 - RNA, 21 nt, Artificial Sequence
  RPE65 RNA guide
uugauucuuguaacugagcau

SEQ ID NO: 46283 - RNA, 21 nt, Artificial Sequence
  RPE65 RNA guide
uugccuaccuuugauaccaau

SEQ ID NO: 46284 - RNA, 21 nt, Artificial Sequence
  RPE65 RNA guide
uugcuuugccuaccuuugaua

SEQ ID NO: 46285 - RNA, 21 nt, Artificial Sequence
  RPE65 RNA guide
uugguaucaaagguaggcaaa

SEQ ID NO: 46286 - RNA, 21 nt, Artificial Sequence
  RPE65 RNA guide
uuguaacugagcauaccacau

SEQ ID NO: 46287 - RNA, 21 nt, Artificial Sequence
  RPE65 RNA guide
uuguauauaugugguaugcuc

SEQ ID NO: 46288 - RNA, 21 nt, Artificial Sequence
  RPE65 RNA guide
uugucuguggcuugagaauca

SEQ ID NO: 46289 - RNA, 21 nt, Artificial Sequence
  RPE65 RNA guide
uugugaaugaaagggcugauu

SEQ ID NO: 46290 - RNA, 21 nt, Artificial Sequence
  RPE65 RNA guide
uugugaucaggauugguauca

SEQ ID NO: 46291 - RNA, 21 nt, Artificial Sequence
  RPE65 RNA guide
uuuaaagauuugcuuugccua

SEQ ID NO: 46292 - RNA, 21 nt, Artificial Sequence
  RPE65 RNA guide
uuucauguaggcacuguugau

SEQ ID NO: 46293 - RNA, 21 nt, Artificial Sequence
  RPE65 RNA guide
uuucauucacaagcccauuug

SEQ ID NO: 46294 - RNA, 21 nt, Artificial Sequence
  RPE65 RNA guide
uuuccugaagauucauagcag

SEQ ID NO: 46295 - RNA, 21 nt, Artificial Sequence
  RPE65 RNA guide
uuugauaccaauccugaucac

SEQ ID NO: 46296 - RNA, 21 nt, Artificial Sequence
  RPE65 RNA guide
uuugccuaccuuugauaccaa

SEQ ID NO: 46297 - RNA, 21 nt, Artificial Sequence
  RPE65 RNA guide
uuugcuuugccuaccuuugau

SEQ ID NO: 46298 - RNA, 21 nt, Artificial Sequence
  RPE65 RNA guide
uuuguauauaugugguaugcu

SEQ ID NO: 46299 - RNA, 21 nt, Artificial Sequence
  RPE65 RNA guide
uuugucuguggcuugagaauc

SEQ ID NO: 46300 - RNA, 21 nt, Artificial Sequence
  RPE65 RNA guide
uuuuccugaagauucauagca

SEQ ID NO: 46301 - RNA, 22 nt, Artificial Sequence
  RPE65 RNA guide
aaaauauugugaucaggauugg

SEQ ID NO: 46302 - RNA, 22 nt, Artificial Sequence
  RPE65 RNA guide
aaacacaaaugggcuugugaau

SEQ ID NO: 46303 - RNA, 22 nt, Artificial Sequence
  RPE65 RNA guide
aaacuugaguuuuccugaagau

SEQ ID NO: 46304 - RNA, 22 nt, Artificial Sequence
  RPE65 RNA guide
aaagauuugcuuugccuaccuu

SEQ ID NO: 46305 - RNA, 22 nt, Artificial Sequence
  RPE65 RNA guide
aaagggcugauucucaagccac

SEQ ID NO: 46306 - RNA, 22 nt, Artificial Sequence
  RPE65 RNA guide
aaagguaggcaaagcaaaucuu

SEQ ID NO: 46307 - RNA, 22 nt, Artificial Sequence
  RPE65 RNA guide
aaauauugugaucaggauuggu

SEQ ID NO: 46308 - RNA, 22 nt, Artificial Sequence
  RPE65 RNA guide
aaaugggcuugugaaugaaagg

SEQ ID NO: 46309 - RNA, 22 nt, Artificial Sequence
  RPE65 RNA guide
aaauuugucuguggcuugagaa

SEQ ID NO: 46310 - RNA, 22 nt, Artificial Sequence
  RPE65 RNA guide
aacacaaaugggcuugugaaug

SEQ ID NO: 46311 - RNA, 22 nt, Artificial Sequence
  RPE65 RNA guide
aacucaaguuuaaagauuugcu

SEQ ID NO: 46312 - RNA, 22 nt, Artificial Sequence
  RPE65 RNA guide
aacugagcauaccacauauaua

SEQ ID NO: 46313 - RNA, 22 nt, Artificial Sequence
  RPE65 RNA guide
aacuugaaggccugcuaugaau

SEQ ID NO: 46314 - RNA, 22 nt, Artificial Sequence
  RPE65 RNA guide
aacuugaguuuuccugaagauu

SEQ ID NO: 46315 - RNA, 22 nt, Artificial Sequence
  RPE65 RNA guide
aagaaucaacagugccuacaug

SEQ ID NO: 46316 - RNA, 22 nt, Artificial Sequence
  RPE65 RNA guide
aagauucauagcaggccuucaa

SEQ ID NO: 46317 - RNA, 22 nt, Artificial Sequence
  RPE65 RNA guide
aagauuugcuuugccuaccuuu

SEQ ID NO: 46318 - RNA, 22 nt, Artificial Sequence
  RPE65 RNA guide
aagccacagacaaauuuguaua

SEQ ID NO: 46319 - RNA, 22 nt, Artificial Sequence
  RPE65 RNA guide
aaggccugcuaugaaucuucag

SEQ ID NO: 46320 - RNA, 22 nt, Artificial Sequence
  RPE65 RNA guide
aagggcugauucucaagccaca

SEQ ID NO: 46321 - RNA, 22 nt, Artificial Sequence
  RPE65 RNA guide
aagguaggcaaagcaaaucuuu

SEQ ID NO: 46322 - RNA, 22 nt, Artificial Sequence
  RPE65 RNA guide
aaguuuaaagauuugcuuugcc

SEQ ID NO: 46323 - RNA, 22 nt, Artificial Sequence
  RPE65 RNA guide
aauauugugaucaggauuggua

SEQ ID NO: 46324 - RNA, 22 nt, Artificial Sequence
  RPE65 RNA guide
aaucaacagugccuacaugaaa

SEQ ID NO: 46325 - RNA, 22 nt, Artificial Sequence
  RPE65 RNA guide
aaucagcccuuucauucacaag

SEQ ID NO: 46326 - RNA, 22 nt, Artificial Sequence
  RPE65 RNA guide
aaugaaagggcugauucucaag

SEQ ID NO: 46327 - RNA, 22 nt, Artificial Sequence
  RPE65 RNA guide
aaugggcuugugaaugaaaggg

SEQ ID NO: 46328 - RNA, 22 nt, Artificial Sequence
  RPE65 RNA guide
aauuaauuucauguaggcacug

SEQ ID NO: 46329 - RNA, 22 nt, Artificial Sequence
  RPE65 RNA guide
aauuucauguaggcacuguuga

SEQ ID NO: 46330 - RNA, 22 nt, Artificial Sequence
  RPE65 RNA guide
aauuuguauauaugugguaugc

SEQ ID NO: 46331 - RNA, 22 nt, Artificial Sequence
  RPE65 RNA guide
aauuugucuguggcuugagaau

SEQ ID NO: 46332 - RNA, 22 nt, Artificial Sequence
  RPE65 RNA guide
acaaaugggcuugugaaugaaa

SEQ ID NO: 46333 - RNA, 22 nt, Artificial Sequence
  RPE65 RNA guide
acaaauuugucuguggcuugag

SEQ ID NO: 46334 - RNA, 22 nt, Artificial Sequence
  RPE65 RNA guide
acaagaaucaacagugccuaca

SEQ ID NO: 46335 - RNA, 22 nt, Artificial Sequence
  RPE65 RNA guide
acaagcccauuuguguuucuga

SEQ ID NO: 46336 - RNA, 22 nt, Artificial Sequence
  RPE65 RNA guide
acacaaaugggcuugugaauga

SEQ ID NO: 46337 - RNA, 22 nt, Artificial Sequence
  RPE65 RNA guide
acagugccuacaugaaauuaau

SEQ ID NO: 46338 - RNA, 22 nt, Artificial Sequence
  RPE65 RNA guide
acauaauuaauuucauguaggc

SEQ ID NO: 46339 - RNA, 22 nt, Artificial Sequence
  RPE65 RNA guide
acauauauacaaauuugucugu

SEQ ID NO: 46340 - RNA, 22 nt, Artificial Sequence
  RPE65 RNA guide
accacauauauacaaauuuguc

SEQ ID NO: 46341 - RNA, 22 nt, Artificial Sequence
  RPE65 RNA guide
accuuugauaccaauccugauc

SEQ ID NO: 46342 - RNA, 22 nt, Artificial Sequence
  RPE65 RNA guide
acucaaguuuaaagauuugcuu

SEQ ID NO: 46343 - RNA, 22 nt, Artificial Sequence
  RPE65 RNA guide
acugagcauaccacauauauac

SEQ ID NO: 46344 - RNA, 22 nt, Artificial Sequence
  RPE65 RNA guide
acuguugauucuuguaacugag

SEQ ID NO: 46345 - RNA, 22 nt, Artificial Sequence
  RPE65 RNA guide
acuugaaggccugcuaugaauc

SEQ ID NO: 46346 - RNA, 22 nt, Artificial Sequence
  RPE65 RNA guide
acuugaguuuuccugaagauuc

SEQ ID NO: 46347 - RNA, 22 nt, Artificial Sequence
  RPE65 RNA guide
agaaacacaaaugggcuuguga

SEQ ID NO: 46348 - RNA, 22 nt, Artificial Sequence
  RPE65 RNA guide
agaaucaacagugccuacauga

SEQ ID NO: 46349 - RNA, 22 nt, Artificial Sequence
  RPE65 RNA guide
agaaucagcccuuucauucaca

SEQ ID NO: 46350 - RNA, 22 nt, Artificial Sequence
  RPE65 RNA guide
agauucauagcaggccuucaag

SEQ ID NO: 46351 - RNA, 22 nt, Artificial Sequence
  RPE65 RNA guide
agauuugcuuugccuaccuuug

SEQ ID NO: 46352 - RNA, 22 nt, Artificial Sequence
  RPE65 RNA guide
agcaaaucuuuaaacuugaguu

SEQ ID NO: 46353 - RNA, 22 nt, Artificial Sequence
  RPE65 RNA guide
agccacagacaaauuuguauau

SEQ ID NO: 46354 - RNA, 22 nt, Artificial Sequence
  RPE65 RNA guide
agcccuuucauucacaagccca

SEQ ID NO: 46355 - RNA, 22 nt, Artificial Sequence
  RPE65 RNA guide
aggaaaacucaaguuuaaagau

SEQ ID NO: 46356 - RNA, 22 nt, Artificial Sequence
  RPE65 RNA guide
aggauugguaucaaagguaggc

SEQ ID NO: 46357 - RNA, 22 nt, Artificial Sequence
  RPE65 RNA guide
aggcaaagcaaaucuuuaaacu

SEQ ID NO: 46358 - RNA, 22 nt, Artificial Sequence
  RPE65 RNA guide
aggcacuguugauucuuguaac

SEQ ID NO: 46359 - RNA, 22 nt, Artificial Sequence
  RPE65 RNA guide
aggccugcuaugaaucuucagg

SEQ ID NO: 46360 - RNA, 22 nt, Artificial Sequence
  RPE65 RNA guide
agggcugauucucaagccacag

SEQ ID NO: 46361 - RNA, 22 nt, Artificial Sequence
  RPE65 RNA guide
agguaggcaaagcaaaucuuua

SEQ ID NO: 46362 - RNA, 22 nt, Artificial Sequence
  RPE65 RNA guide
aguuacaagaaucaacagugcc

SEQ ID NO: 46363 - RNA, 22 nt, Artificial Sequence
  RPE65 RNA guide
aguuuaaagauuugcuuugccu

SEQ ID NO: 46364 - RNA, 22 nt, Artificial Sequence
  RPE65 RNA guide
aguuuuccugaagauucauagc

SEQ ID NO: 46365 - RNA, 22 nt, Artificial Sequence
  RPE65 RNA guide
auacaaauuugucuguggcuug

SEQ ID NO: 46366 - RNA, 22 nt, Artificial Sequence
  RPE65 RNA guide
auauacaaauuugucuguggcu

SEQ ID NO: 46367 - RNA, 22 nt, Artificial Sequence
  RPE65 RNA guide
auauauacaaauuugucugugg

SEQ ID NO: 46368 - RNA, 22 nt, Artificial Sequence
  RPE65 RNA guide
auauaugugguaugcucaguua

SEQ ID NO: 46369 - RNA, 22 nt, Artificial Sequence
  RPE65 RNA guide
auaugugguaugcucaguuaca

SEQ ID NO: 46370 - RNA, 22 nt, Artificial Sequence
  RPE65 RNA guide
auauugugaucaggauugguau

SEQ ID NO: 46371 - RNA, 22 nt, Artificial Sequence
  RPE65 RNA guide
aucaaagguaggcaaagcaaau

SEQ ID NO: 46372 - RNA, 22 nt, Artificial Sequence
  RPE65 RNA guide
aucaacagugccuacaugaaau

SEQ ID NO: 46373 - RNA, 22 nt, Artificial Sequence
  RPE65 RNA guide
aucagcccuuucauucacaagc

SEQ ID NO: 46374 - RNA, 22 nt, Artificial Sequence
  RPE65 RNA guide
aucaggauugguaucaaaggua

SEQ ID NO: 46375 - RNA, 22 nt, Artificial Sequence
  RPE65 RNA guide
aucuucaggaaaacucaaguuu

SEQ ID NO: 46376 - RNA, 22 nt, Artificial Sequence
  RPE65 RNA guide
aucuuuaaacuugaguuuuccu

SEQ ID NO: 46377 - RNA, 22 nt, Artificial Sequence
  RPE65 RNA guide
augaaagggcugauucucaagc

SEQ ID NO: 46378 - RNA, 22 nt, Artificial Sequence
  RPE65 RNA guide
augaaucuucaggaaaacucaa

SEQ ID NO: 46379 - RNA, 22 nt, Artificial Sequence
  RPE65 RNA guide
augcucaguuacaagaaucaac

SEQ ID NO: 46380 - RNA, 22 nt, Artificial Sequence
  RPE65 RNA guide
augggcuugugaaugaaagggc

SEQ ID NO: 46381 - RNA, 22 nt, Artificial Sequence
  RPE65 RNA guide
auguaggcacuguugauucuug

SEQ ID NO: 46382 - RNA, 22 nt, Artificial Sequence
  RPE65 RNA guide
augugguaugcucaguuacaag

SEQ ID NO: 46383 - RNA, 22 nt, Artificial Sequence
  RPE65 RNA guide
auuaauuucauguaggcacugu

SEQ ID NO: 46384 - RNA, 22 nt, Artificial Sequence
  RPE65 RNA guide
auucacaagcccauuuguguuu

SEQ ID NO: 46385 - RNA, 22 nt, Artificial Sequence
  RPE65 RNA guide
auucucaagccacagacaaauu

SEQ ID NO: 46386 - RNA, 22 nt, Artificial Sequence
  RPE65 RNA guide
auucuuguaacugagcauacca

SEQ ID NO: 46387 - RNA, 22 nt, Artificial Sequence
  RPE65 RNA guide
auugguaucaaagguaggcaaa

SEQ ID NO: 46388 - RNA, 22 nt, Artificial Sequence
  RPE65 RNA guide
auugugaucaggauugguauca

SEQ ID NO: 46389 - RNA, 22 nt, Artificial Sequence
  RPE65 RNA guide
auuucauguaggcacuguugau

SEQ ID NO: 46390 - RNA, 22 nt, Artificial Sequence
  RPE65 RNA guide
auuugcuuugccuaccuuugau

SEQ ID NO: 46391 - RNA, 22 nt, Artificial Sequence
  RPE65 RNA guide
auuuguauauaugugguaugcu

SEQ ID NO: 46392 - RNA, 22 nt, Artificial Sequence
  RPE65 RNA guide
auuugucuguggcuugagaauc

SEQ ID NO: 46393 - RNA, 22 nt, Artificial Sequence
  RPE65 RNA guide
caaagguaggcaaagcaaaucu

SEQ ID NO: 46394 - RNA, 22 nt, Artificial Sequence
  RPE65 RNA guide
caaaucuuuaaacuugaguuuu

SEQ ID NO: 46395 - RNA, 22 nt, Artificial Sequence
  RPE65 RNA guide
caaaugggcuugugaaugaaag

SEQ ID NO: 46396 - RNA, 22 nt, Artificial Sequence
  RPE65 RNA guide
caaauuuguauauaugugguau

SEQ ID NO: 46397 - RNA, 22 nt, Artificial Sequence
  RPE65 RNA guide
caaauuugucuguggcuugaga

SEQ ID NO: 46398 - RNA, 22 nt, Artificial Sequence
  RPE65 RNA guide
caacagugccuacaugaaauua

SEQ ID NO: 46399 - RNA, 22 nt, Artificial Sequence
  RPE65 RNA guide
caagaaucaacagugccuacau

SEQ ID NO: 46400 - RNA, 22 nt, Artificial Sequence
  RPE65 RNA guide
caagccacagacaaauuuguau

SEQ ID NO: 46401 - RNA, 22 nt, Artificial Sequence
  RPE65 RNA guide
caaguuuaaagauuugcuuugc

SEQ ID NO: 46402 - RNA, 22 nt, Artificial Sequence
  RPE65 RNA guide
cacaaaugggcuugugaaugaa

SEQ ID NO: 46403 - RNA, 22 nt, Artificial Sequence
  RPE65 RNA guide
cacaagcccauuuguguuucug

SEQ ID NO: 46404 - RNA, 22 nt, Artificial Sequence
  RPE65 RNA guide
cacagacaaauuuguauauaug

SEQ ID NO: 46405 - RNA, 22 nt, Artificial Sequence
  RPE65 RNA guide
cacauauauacaaauuugucug

SEQ ID NO: 46406 - RNA, 22 nt, Artificial Sequence
  RPE65 RNA guide
cacuguugauucuuguaacuga

SEQ ID NO: 46407 - RNA, 22 nt, Artificial Sequence
  RPE65 RNA guide
cagaaacacaaaugggcuugug

SEQ ID NO: 46408 - RNA, 22 nt, Artificial Sequence
  RPE65 RNA guide
cagcccuuucauucacaagccc

SEQ ID NO: 46409 - RNA, 22 nt, Artificial Sequence
  RPE65 RNA guide
caggaaaacucaaguuuaaaga

SEQ ID NO: 46410 - RNA, 22 nt, Artificial Sequence
  RPE65 RNA guide
caggauugguaucaaagguagg

SEQ ID NO: 46411 - RNA, 22 nt, Artificial Sequence
  RPE65 RNA guide
cagugccuacaugaaauuaauu

SEQ ID NO: 46412 - RNA, 22 nt, Artificial Sequence
  RPE65 RNA guide
caguuacaagaaucaacagugc

SEQ ID NO: 46413 - RNA, 22 nt, Artificial Sequence
  RPE65 RNA guide
cauaauuaauuucauguaggca

SEQ ID NO: 46414 - RNA, 22 nt, Artificial Sequence
  RPE65 RNA guide
cauauauacaaauuugucugug

SEQ ID NO: 46415 - RNA, 22 nt, Artificial Sequence
  RPE65 RNA guide
cauguaggcacuguugauucuu

SEQ ID NO: 46416 - RNA, 22 nt, Artificial Sequence
  RPE65 RNA guide
cauucacaagcccauuuguguu

SEQ ID NO: 46417 - RNA, 22 nt, Artificial Sequence
  RPE65 RNA guide
ccacagacaaauuuguauauau

SEQ ID NO: 46418 - RNA, 22 nt, Artificial Sequence
  RPE65 RNA guide
ccacauauauacaaauuugucu

SEQ ID NO: 46419 - RNA, 22 nt, Artificial Sequence
  RPE65 RNA guide
cccuuucauucacaagcccauu

SEQ ID NO: 46420 - RNA, 22 nt, Artificial Sequence
  RPE65 RNA guide
ccuaccuuugauaccaauccug

SEQ ID NO: 46421 - RNA, 22 nt, Artificial Sequence
  RPE65 RNA guide
ccugaagauucauagcaggccu

SEQ ID NO: 46422 - RNA, 22 nt, Artificial Sequence
  RPE65 RNA guide
ccugcuaugaaucuucaggaaa

SEQ ID NO: 46423 - RNA, 22 nt, Artificial Sequence
  RPE65 RNA guide
ccuuucauucacaagcccauuu

SEQ ID NO: 46424 - RNA, 22 nt, Artificial Sequence
  RPE65 RNA guide
ccuuugauaccaauccugauca

SEQ ID NO: 46425 - RNA, 22 nt, Artificial Sequence
  RPE65 RNA guide
cuaccuuugauaccaauccuga

SEQ ID NO: 46426 - RNA, 22 nt, Artificial Sequence
  RPE65 RNA guide
cuaugaaucuucaggaaaacuc

SEQ ID NO: 46427 - RNA, 22 nt, Artificial Sequence
  RPE65 RNA guide
cucaagccacagacaaauuugu

SEQ ID NO: 46428 - RNA, 22 nt, Artificial Sequence
  RPE65 RNA guide
cucaaguuuaaagauuugcuuu

SEQ ID NO: 46429 - RNA, 22 nt, Artificial Sequence
  RPE65 RNA guide
cucaguuacaagaaucaacagu

SEQ ID NO: 46430 - RNA, 22 nt, Artificial Sequence
  RPE65 RNA guide
cugaagauucauagcaggccuu

SEQ ID NO: 46431 - RNA, 22 nt, Artificial Sequence
  RPE65 RNA guide
cugagcauaccacauauauaca

SEQ ID NO: 46432 - RNA, 22 nt, Artificial Sequence
  RPE65 RNA guide
cugauucucaagccacagacaa

SEQ ID NO: 46433 - RNA, 22 nt, Artificial Sequence
  RPE65 RNA guide
cugcuaugaaucuucaggaaaa

SEQ ID NO: 46434 - RNA, 22 nt, Artificial Sequence
  RPE65 RNA guide
cuguggcuugagaaucagcccu

SEQ ID NO: 46435 - RNA, 22 nt, Artificial Sequence
  RPE65 RNA guide
cuguucagaaacacaaaugggc

SEQ ID NO: 46436 - RNA, 22 nt, Artificial Sequence
  RPE65 RNA guide
cuguugauucuuguaacugagc

SEQ ID NO: 46437 - RNA, 22 nt, Artificial Sequence
  RPE65 RNA guide
cuucaggaaaacucaaguuuaa

SEQ ID NO: 46438 - RNA, 22 nt, Artificial Sequence
  RPE65 RNA guide
cuugaaggccugcuaugaaucu

SEQ ID NO: 46439 - RNA, 22 nt, Artificial Sequence
  RPE65 RNA guide
cuugagaaucagcccuuucauu

SEQ ID NO: 46440 - RNA, 22 nt, Artificial Sequence
  RPE65 RNA guide
cuugaguuuuccugaagauuca

SEQ ID NO: 46441 - RNA, 22 nt, Artificial Sequence
  RPE65 RNA guide
cuuguaacugagcauaccacau

SEQ ID NO: 46442 - RNA, 22 nt, Artificial Sequence
  RPE65 RNA guide
cuugugaaugaaagggcugauu

SEQ ID NO: 46443 - RNA, 22 nt, Artificial Sequence
  RPE65 RNA guide
cuuuaaacuugaguuuuccuga

SEQ ID NO: 46444 - RNA, 22 nt, Artificial Sequence
  RPE65 RNA guide
cuuucauucacaagcccauuug

SEQ ID NO: 46445 - RNA, 22 nt, Artificial Sequence
  RPE65 RNA guide
cuuugauaccaauccugaucac

SEQ ID NO: 46446 - RNA, 22 nt, Artificial Sequence
  RPE65 RNA guide
cuuugccuaccuuugauaccaa

SEQ ID NO: 46447 - RNA, 22 nt, Artificial Sequence
  RPE65 RNA guide
gaaacacaaaugggcuugugaa

SEQ ID NO: 46448 - RNA, 22 nt, Artificial Sequence
  RPE65 RNA guide
gaaagggcugauucucaagcca

SEQ ID NO: 46449 - RNA, 22 nt, Artificial Sequence
  RPE65 RNA guide
gaagauucauagcaggccuuca

SEQ ID NO: 46450 - RNA, 22 nt, Artificial Sequence
  RPE65 RNA guide
gaaggccugcuaugaaucuuca

SEQ ID NO: 46451 - RNA, 22 nt, Artificial Sequence
  RPE65 RNA guide
gaaucaacagugccuacaugaa

SEQ ID NO: 46452 - RNA, 22 nt, Artificial Sequence
  RPE65 RNA guide
gaaucagcccuuucauucacaa

SEQ ID NO: 46453 - RNA, 22 nt, Artificial Sequence
  RPE65 RNA guide
gaaucuucaggaaaacucaagu

SEQ ID NO: 46454 - RNA, 22 nt, Artificial Sequence
  RPE65 RNA guide
gaaugaaagggcugauucucaa

SEQ ID NO: 46455 - RNA, 22 nt, Artificial Sequence
  RPE65 RNA guide
gacaaauuuguauauauguggu

SEQ ID NO: 46456 - RNA, 22 nt, Artificial Sequence
  RPE65 RNA guide
gagaaucagcccuuucauucac

SEQ ID NO: 46457 - RNA, 22 nt, Artificial Sequence
  RPE65 RNA guide
gagcauaccacauauauacaaa

SEQ ID NO: 46458 - RNA, 22 nt, Artificial Sequence
  RPE65 RNA guide
gaguuuuccugaagauucauag

SEQ ID NO: 46459 - RNA, 22 nt, Artificial Sequence
  RPE65 RNA guide
gauaccaauccugaucacaaua

SEQ ID NO: 46460 - RNA, 22 nt, Artificial Sequence
  RPE65 RNA guide
gaucaggauugguaucaaaggu

SEQ ID NO: 46461 - RNA, 22 nt, Artificial Sequence
  RPE65 RNA guide
gauucucaagccacagacaaau

SEQ ID NO: 46462 - RNA, 22 nt, Artificial Sequence
  RPE65 RNA guide
gauucuuguaacugagcauacc

SEQ ID NO: 46463 - RNA, 22 nt, Artificial Sequence
  RPE65 RNA guide
gauugguaucaaagguaggcaa

SEQ ID NO: 46464 - RNA, 22 nt, Artificial Sequence
  RPE65 RNA guide
gauuugcuuugccuaccuuuga

SEQ ID NO: 46465 - RNA, 22 nt, Artificial Sequence
  RPE65 RNA guide
gcaaagcaaaucuuuaaacuug

SEQ ID NO: 46466 - RNA, 22 nt, Artificial Sequence
  RPE65 RNA guide
gcaaaucuuuaaacuugaguuu

SEQ ID NO: 46467 - RNA, 22 nt, Artificial Sequence
  RPE65 RNA guide
gcacuguugauucuuguaacug

SEQ ID NO: 46468 - RNA, 22 nt, Artificial Sequence
  RPE65 RNA guide
gcauaccacauauauacaaauu

SEQ ID NO: 46469 - RNA, 22 nt, Artificial Sequence
  RPE65 RNA guide
gccacagacaaauuuguauaua

SEQ ID NO: 46470 - RNA, 22 nt, Artificial Sequence
  RPE65 RNA guide
gcccuuucauucacaagcccau

SEQ ID NO: 46471 - RNA, 22 nt, Artificial Sequence
  RPE65 RNA guide
gccuaccuuugauaccaauccu

SEQ ID NO: 46472 - RNA, 22 nt, Artificial Sequence
  RPE65 RNA guide
gccugcuaugaaucuucaggaa

SEQ ID NO: 46473 - RNA, 22 nt, Artificial Sequence
  RPE65 RNA guide
gcuaugaaucuucaggaaaacu

SEQ ID NO: 46474 - RNA, 22 nt, Artificial Sequence
  RPE65 RNA guide
gcucaguuacaagaaucaacag

SEQ ID NO: 46475 - RNA, 22 nt, Artificial Sequence
  RPE65 RNA guide
gcugauucucaagccacagaca

SEQ ID NO: 46476 - RNA, 22 nt, Artificial Sequence
  RPE65 RNA guide
gcuugagaaucagcccuuucau

SEQ ID NO: 46477 - RNA, 22 nt, Artificial Sequence
  RPE65 RNA guide
gcuugugaaugaaagggcugau

SEQ ID NO: 46478 - RNA, 22 nt, Artificial Sequence
  RPE65 RNA guide
gcuuugccuaccuuugauacca

SEQ ID NO: 46479 - RNA, 22 nt, Artificial Sequence
  RPE65 RNA guide
ggaaaacucaaguuuaaagauu

SEQ ID NO: 46480 - RNA, 22 nt, Artificial Sequence
  RPE65 RNA guide
ggauugguaucaaagguaggca

SEQ ID NO: 46481 - RNA, 22 nt, Artificial Sequence
  RPE65 RNA guide
ggcaaagcaaaucuuuaaacuu

SEQ ID NO: 46482 - RNA, 22 nt, Artificial Sequence
  RPE65 RNA guide
ggcacuguugauucuuguaacu

SEQ ID NO: 46483 - RNA, 22 nt, Artificial Sequence
  RPE65 RNA guide
ggccugcuaugaaucuucagga

SEQ ID NO: 46484 - RNA, 22 nt, Artificial Sequence
  RPE65 RNA guide
ggcugauucucaagccacagac

SEQ ID NO: 46485 - RNA, 22 nt, Artificial Sequence
  RPE65 RNA guide
ggcuugagaaucagcccuuuca

SEQ ID NO: 46486 - RNA, 22 nt, Artificial Sequence
  RPE65 RNA guide
ggcuugugaaugaaagggcuga

SEQ ID NO: 46487 - RNA, 22 nt, Artificial Sequence
  RPE65 RNA guide
gggcugauucucaagccacaga

SEQ ID NO: 46488 - RNA, 22 nt, Artificial Sequence
  RPE65 RNA guide
gggcuugugaaugaaagggcug

SEQ ID NO: 46489 - RNA, 22 nt, Artificial Sequence
  RPE65 RNA guide
gguaggcaaagcaaaucuuuaa

SEQ ID NO: 46490 - RNA, 22 nt, Artificial Sequence
  RPE65 RNA guide
gguaucaaagguaggcaaagca

SEQ ID NO: 46491 - RNA, 22 nt, Artificial Sequence
  RPE65 RNA guide
gguaugcucaguuacaagaauc

SEQ ID NO: 46492 - RNA, 22 nt, Artificial Sequence
  RPE65 RNA guide
guaacugagcauaccacauaua

SEQ ID NO: 46493 - RNA, 22 nt, Artificial Sequence
  RPE65 RNA guide
guaacuugaaggccugcuauga

SEQ ID NO: 46494 - RNA, 22 nt, Artificial Sequence
  RPE65 RNA guide
guaggcaaagcaaaucuuuaaa

SEQ ID NO: 46495 - RNA, 22 nt, Artificial Sequence
  RPE65 RNA guide
guaggcacuguugauucuugua

SEQ ID NO: 46496 - RNA, 22 nt, Artificial Sequence
  RPE65 RNA guide
guauauaugugguaugcucagu

SEQ ID NO: 46497 - RNA, 22 nt, Artificial Sequence
  RPE65 RNA guide
guaucaaagguaggcaaagcaa

SEQ ID NO: 46498 - RNA, 22 nt, Artificial Sequence
  RPE65 RNA guide
guaugcucaguuacaagaauca

SEQ ID NO: 46499 - RNA, 22 nt, Artificial Sequence
  RPE65 RNA guide
gucuguggcuugagaaucagcc

SEQ ID NO: 46500 - RNA, 22 nt, Artificial Sequence
  RPE65 RNA guide
gugaaugaaagggcugauucuc

SEQ ID NO: 46501 - RNA, 22 nt, Artificial Sequence
  RPE65 RNA guide
gugaucaggauugguaucaaag

SEQ ID NO: 46502 - RNA, 22 nt, Artificial Sequence
  RPE65 RNA guide
guggcuugagaaucagcccuuu

SEQ ID NO: 46503 - RNA, 22 nt, Artificial Sequence
  RPE65 RNA guide
gugguaugcucaguuacaagaa

SEQ ID NO: 46504 - RNA, 22 nt, Artificial Sequence
  RPE65 RNA guide
guuacaagaaucaacagugccu

SEQ ID NO: 46505 - RNA, 22 nt, Artificial Sequence
  RPE65 RNA guide
guucagaaacacaaaugggcuu

SEQ ID NO: 46506 - RNA, 22 nt, Artificial Sequence
  RPE65 RNA guide
guugauucuuguaacugagcau

SEQ ID NO: 46507 - RNA, 22 nt, Artificial Sequence
  RPE65 RNA guide
guuuaaagauuugcuuugccua

SEQ ID NO: 46508 - RNA, 22 nt, Artificial Sequence
  RPE65 RNA guide
guuuuccugaagauucauagca

SEQ ID NO: 46509 - RNA, 22 nt, Artificial Sequence
  RPE65 RNA guide
uaaacuugaguuuuccugaaga

SEQ ID NO: 46510 - RNA, 22 nt, Artificial Sequence
  RPE65 RNA guide
uaaagauuugcuuugccuaccu

SEQ ID NO: 46511 - RNA, 22 nt, Artificial Sequence
  RPE65 RNA guide
uaacugagcauaccacauauau

SEQ ID NO: 46512 - RNA, 22 nt, Artificial Sequence
  RPE65 RNA guide
uaacuugaaggccugcuaugaa

SEQ ID NO: 46513 - RNA, 22 nt, Artificial Sequence
  RPE65 RNA guide
uaauuaauuucauguaggcacu

SEQ ID NO: 46514 - RNA, 22 nt, Artificial Sequence
  RPE65 RNA guide
uaauuucauguaggcacuguug

SEQ ID NO: 46515 - RNA, 22 nt, Artificial Sequence
  RPE65 RNA guide
uacaaauuugucuguggcuuga

SEQ ID NO: 46516 - RNA, 22 nt, Artificial Sequence
  RPE65 RNA guide
uacaagaaucaacagugccuac

SEQ ID NO: 46517 - RNA, 22 nt, Artificial Sequence
  RPE65 RNA guide
uaccuuugauaccaauccugau

SEQ ID NO: 46518 - RNA, 22 nt, Artificial Sequence
  RPE65 RNA guide
uaggcaaagcaaaucuuuaaac

SEQ ID NO: 46519 - RNA, 22 nt, Artificial Sequence
  RPE65 RNA guide
uaggcacuguugauucuuguaa

SEQ ID NO: 46520 - RNA, 22 nt, Artificial Sequence
  RPE65 RNA guide
uauacaaauuugucuguggcuu

SEQ ID NO: 46521 - RNA, 22 nt, Artificial Sequence
  RPE65 RNA guide
uauauacaaauuugucuguggc

SEQ ID NO: 46522 - RNA, 22 nt, Artificial Sequence
  RPE65 RNA guide
uauauaugugguaugcucaguu

SEQ ID NO: 46523 - RNA, 22 nt, Artificial Sequence
  RPE65 RNA guide
uauaugugguaugcucaguuac

SEQ ID NO: 46524 - RNA, 22 nt, Artificial Sequence
  RPE65 RNA guide
uaucaaagguaggcaaagcaaa

SEQ ID NO: 46525 - RNA, 22 nt, Artificial Sequence
  RPE65 RNA guide
uaugaaucuucaggaaaacuca

SEQ ID NO: 46526 - RNA, 22 nt, Artificial Sequence
  RPE65 RNA guide
uaugcucaguuacaagaaucaa

SEQ ID NO: 46527 - RNA, 22 nt, Artificial Sequence
  RPE65 RNA guide
uaugugguaugcucaguuacaa

SEQ ID NO: 46528 - RNA, 22 nt, Artificial Sequence
  RPE65 RNA guide
uauugugaucaggauugguauc

SEQ ID NO: 46529 - RNA, 22 nt, Artificial Sequence
  RPE65 RNA guide
ucaaagguaggcaaagcaaauc

SEQ ID NO: 46530 - RNA, 22 nt, Artificial Sequence
  RPE65 RNA guide
ucaacagugccuacaugaaauu

SEQ ID NO: 46531 - RNA, 22 nt, Artificial Sequence
  RPE65 RNA guide
ucaagccacagacaaauuugua

SEQ ID NO: 46532 - RNA, 22 nt, Artificial Sequence
  RPE65 RNA guide
ucaaguuuaaagauuugcuuug

SEQ ID NO: 46533 - RNA, 22 nt, Artificial Sequence
  RPE65 RNA guide
ucacaagcccauuuguguuucu

SEQ ID NO: 46534 - RNA, 22 nt, Artificial Sequence
  RPE65 RNA guide
ucagaaacacaaaugggcuugu

SEQ ID NO: 46535 - RNA, 22 nt, Artificial Sequence
  RPE65 RNA guide
ucagcccuuucauucacaagcc

SEQ ID NO: 46536 - RNA, 22 nt, Artificial Sequence
  RPE65 RNA guide
ucaggauugguaucaaagguag

SEQ ID NO: 46537 - RNA, 22 nt, Artificial Sequence
  RPE65 RNA guide
ucaguuacaagaaucaacagug

SEQ ID NO: 46538 - RNA, 22 nt, Artificial Sequence
  RPE65 RNA guide
ucauguaggcacuguugauucu

SEQ ID NO: 46539 - RNA, 22 nt, Artificial Sequence
  RPE65 RNA guide
ucauucacaagcccauuugugu

SEQ ID NO: 46540 - RNA, 22 nt, Artificial Sequence
  RPE65 RNA guide
uccugaagauucauagcaggcc

SEQ ID NO: 46541 - RNA, 22 nt, Artificial Sequence
  RPE65 RNA guide
ucucaagccacagacaaauuug

SEQ ID NO: 46542 - RNA, 22 nt, Artificial Sequence
  RPE65 RNA guide
ucuguggcuugagaaucagccc

SEQ ID NO: 46543 - RNA, 22 nt, Artificial Sequence
  RPE65 RNA guide
ucuucaggaaaacucaaguuua

SEQ ID NO: 46544 - RNA, 22 nt, Artificial Sequence
  RPE65 RNA guide
ucuuguaacugagcauaccaca

SEQ ID NO: 46545 - RNA, 22 nt, Artificial Sequence
  RPE65 RNA guide
ucuuuaaacuugaguuuuccug

SEQ ID NO: 46546 - RNA, 22 nt, Artificial Sequence
  RPE65 RNA guide
ugaaagggcugauucucaagcc

SEQ ID NO: 46547 - RNA, 22 nt, Artificial Sequence
  RPE65 RNA guide
ugaagauucauagcaggccuuc

SEQ ID NO: 46548 - RNA, 22 nt, Artificial Sequence
  RPE65 RNA guide
ugaaggccugcuaugaaucuuc

SEQ ID NO: 46549 - RNA, 22 nt, Artificial Sequence
  RPE65 RNA guide
ugaaucuucaggaaaacucaag

SEQ ID NO: 46550 - RNA, 22 nt, Artificial Sequence
  RPE65 RNA guide
ugaaugaaagggcugauucuca

SEQ ID NO: 46551 - RNA, 22 nt, Artificial Sequence
  RPE65 RNA guide
ugagaaucagcccuuucauuca

SEQ ID NO: 46552 - RNA, 22 nt, Artificial Sequence
  RPE65 RNA guide
ugaguuuuccugaagauucaua

SEQ ID NO: 46553 - RNA, 22 nt, Artificial Sequence
  RPE65 RNA guide
ugauaccaauccugaucacaau

SEQ ID NO: 46554 - RNA, 22 nt, Artificial Sequence
  RPE65 RNA guide
ugaucaggauugguaucaaagg

SEQ ID NO: 46555 - RNA, 22 nt, Artificial Sequence
  RPE65 RNA guide
ugauucucaagccacagacaaa

SEQ ID NO: 46556 - RNA, 22 nt, Artificial Sequence
  RPE65 RNA guide
ugauucuuguaacugagcauac

SEQ ID NO: 46557 - RNA, 22 nt, Artificial Sequence
  RPE65 RNA guide
ugccuaccuuugauaccaaucc

SEQ ID NO: 46558 - RNA, 22 nt, Artificial Sequence
  RPE65 RNA guide
ugcuaugaaucuucaggaaaac

SEQ ID NO: 46559 - RNA, 22 nt, Artificial Sequence
  RPE65 RNA guide
ugcucaguuacaagaaucaaca

SEQ ID NO: 46560 - RNA, 22 nt, Artificial Sequence
  RPE65 RNA guide
ugcuuugccuaccuuugauacc

SEQ ID NO: 46561 - RNA, 22 nt, Artificial Sequence
  RPE65 RNA guide
uggcuugagaaucagcccuuuc

SEQ ID NO: 46562 - RNA, 22 nt, Artificial Sequence
  RPE65 RNA guide
ugggcuugugaaugaaagggcu

SEQ ID NO: 46563 - RNA, 22 nt, Artificial Sequence
  RPE65 RNA guide
ugguaucaaagguaggcaaagc

SEQ ID NO: 46564 - RNA, 22 nt, Artificial Sequence
  RPE65 RNA guide
ugguaugcucaguuacaagaau

SEQ ID NO: 46565 - RNA, 22 nt, Artificial Sequence
  RPE65 RNA guide
uguaacugagcauaccacauau

SEQ ID NO: 46566 - RNA, 22 nt, Artificial Sequence
  RPE65 RNA guide
uguaggcacuguugauucuugu

SEQ ID NO: 46567 - RNA, 22 nt, Artificial Sequence
  RPE65 RNA guide
uguauauaugugguaugcucag

SEQ ID NO: 46568 - RNA, 22 nt, Artificial Sequence
  RPE65 RNA guide
ugucuguggcuugagaaucagc

SEQ ID NO: 46569 - RNA, 22 nt, Artificial Sequence
  RPE65 RNA guide
ugugaaugaaagggcugauucu

SEQ ID NO: 46570 - RNA, 22 nt, Artificial Sequence
  RPE65 RNA guide
ugugaucaggauugguaucaaa

SEQ ID NO: 46571 - RNA, 22 nt, Artificial Sequence
  RPE65 RNA guide
uguggcuugagaaucagcccuu

SEQ ID NO: 46572 - RNA, 22 nt, Artificial Sequence
  RPE65 RNA guide
ugugguaugcucaguuacaaga

SEQ ID NO: 46573 - RNA, 22 nt, Artificial Sequence
  RPE65 RNA guide
uguucagaaacacaaaugggcu

SEQ ID NO: 46574 - RNA, 22 nt, Artificial Sequence
  RPE65 RNA guide
uguugauucuuguaacugagca

SEQ ID NO: 46575 - RNA, 22 nt, Artificial Sequence
  RPE65 RNA guide
uuaaacuugaguuuuccugaag

SEQ ID NO: 46576 - RNA, 22 nt, Artificial Sequence
  RPE65 RNA guide
uuaaagauuugcuuugccuacc

SEQ ID NO: 46577 - RNA, 22 nt, Artificial Sequence
  RPE65 RNA guide
uuaauuucauguaggcacuguu

SEQ ID NO: 46578 - RNA, 22 nt, Artificial Sequence
  RPE65 RNA guide
uuacaagaaucaacagugccua

SEQ ID NO: 46579 - RNA, 22 nt, Artificial Sequence
  RPE65 RNA guide
uucacaagcccauuuguguuuc

SEQ ID NO: 46580 - RNA, 22 nt, Artificial Sequence
  RPE65 RNA guide
uucagaaacacaaaugggcuug

SEQ ID NO: 46581 - RNA, 22 nt, Artificial Sequence
  RPE65 RNA guide
uucauguaggcacuguugauuc

SEQ ID NO: 46582 - RNA, 22 nt, Artificial Sequence
  RPE65 RNA guide
uucauucacaagcccauuugug

SEQ ID NO: 46583 - RNA, 22 nt, Artificial Sequence
  RPE65 RNA guide
uuccugaagauucauagcaggc

SEQ ID NO: 46584 - RNA, 22 nt, Artificial Sequence
  RPE65 RNA guide
uucucaagccacagacaaauuu

SEQ ID NO: 46585 - RNA, 22 nt, Artificial Sequence
  RPE65 RNA guide
uucuuguaacugagcauaccac

SEQ ID NO: 46586 - RNA, 22 nt, Artificial Sequence
  RPE65 RNA guide
uugaaggccugcuaugaaucuu

SEQ ID NO: 46587 - RNA, 22 nt, Artificial Sequence
  RPE65 RNA guide
uugagaaucagcccuuucauuc

SEQ ID NO: 46588 - RNA, 22 nt, Artificial Sequence
  RPE65 RNA guide
uugaguuuuccugaagauucau

SEQ ID NO: 46589 - RNA, 22 nt, Artificial Sequence
  RPE65 RNA guide
uugauaccaauccugaucacaa

SEQ ID NO: 46590 - RNA, 22 nt, Artificial Sequence
  RPE65 RNA guide
uugauucuuguaacugagcaua

SEQ ID NO: 46591 - RNA, 22 nt, Artificial Sequence
  RPE65 RNA guide
uugccuaccuuugauaccaauc

SEQ ID NO: 46592 - RNA, 22 nt, Artificial Sequence
  RPE65 RNA guide
uugcuuugccuaccuuugauac

SEQ ID NO: 46593 - RNA, 22 nt, Artificial Sequence
  RPE65 RNA guide
uugguaucaaagguaggcaaag

SEQ ID NO: 46594 - RNA, 22 nt, Artificial Sequence
  RPE65 RNA guide
uuguaacugagcauaccacaua

SEQ ID NO: 46595 - RNA, 22 nt, Artificial Sequence
  RPE65 RNA guide
uuguauauaugugguaugcuca

SEQ ID NO: 46596 - RNA, 22 nt, Artificial Sequence
  RPE65 RNA guide
uugucuguggcuugagaaucag

SEQ ID NO: 46597 - RNA, 22 nt, Artificial Sequence
  RPE65 RNA guide
uugugaaugaaagggcugauuc

SEQ ID NO: 46598 - RNA, 22 nt, Artificial Sequence
  RPE65 RNA guide
uugugaucaggauugguaucaa

SEQ ID NO: 46599 - RNA, 22 nt, Artificial Sequence
  RPE65 RNA guide
uuuaaagauuugcuuugccuac

SEQ ID NO: 46600 - RNA, 22 nt, Artificial Sequence
  RPE65 RNA guide
uuucauguaggcacuguugauu

SEQ ID NO: 46601 - RNA, 22 nt, Artificial Sequence
  RPE65 RNA guide
uuucauucacaagcccauuugu

SEQ ID NO: 46602 - RNA, 22 nt, Artificial Sequence
  RPE65 RNA guide
uuuccugaagauucauagcagg

SEQ ID NO: 46603 - RNA, 22 nt, Artificial Sequence
  RPE65 RNA guide
uuugauaccaauccugaucaca

SEQ ID NO: 46604 - RNA, 22 nt, Artificial Sequence
  RPE65 RNA guide
uuugccuaccuuugauaccaau

SEQ ID NO: 46605 - RNA, 22 nt, Artificial Sequence
  RPE65 RNA guide
uuugcuuugccuaccuuugaua

SEQ ID NO: 46606 - RNA, 22 nt, Artificial Sequence
  RPE65 RNA guide
uuuguauauaugugguaugcuc

SEQ ID NO: 46607 - RNA, 22 nt, Artificial Sequence
  RPE65 RNA guide
uuugucuguggcuugagaauca

SEQ ID NO: 46608 - RNA, 22 nt, Artificial Sequence
  RPE65 RNA guide
uuuuccugaagauucauagcag

SEQ ID NO: 46609 - RNA, 20 nt, Artificial Sequence
  RPE65 RNA guide
aaacacaucuucuucagaau

SEQ ID NO: 46610 - RNA, 20 nt, Artificial Sequence
  RPE65 RNA guide
aacacaucuucuucagaauc

SEQ ID NO: 46611 - RNA, 20 nt, Artificial Sequence
  RPE65 RNA guide
aaguuugugauucugaagaa

SEQ ID NO: 46612 - RNA, 20 nt, Artificial Sequence
  RPE65 RNA guide
acacaucuucuucagaauca

SEQ ID NO: 46613 - RNA, 20 nt, Artificial Sequence
  RPE65 RNA guide
acaucuucuucagaaucaca

SEQ ID NO: 46614 - RNA, 20 nt, Artificial Sequence
  RPE65 RNA guide
aguuugugauucugaagaag

SEQ ID NO: 46615 - RNA, 20 nt, Artificial Sequence
  RPE65 RNA guide
aucuucuucagaaucacaaa

SEQ ID NO: 46616 - RNA, 20 nt, Artificial Sequence
  RPE65 RNA guide
caaguuugugauucugaaga

SEQ ID NO: 46617 - RNA, 20 nt, Artificial Sequence
  RPE65 RNA guide
cacaucuucuucagaaucac

SEQ ID NO: 46618 - RNA, 20 nt, Artificial Sequence
  RPE65 RNA guide
caucuucuucagaaucacaa

SEQ ID NO: 46619 - RNA, 20 nt, Artificial Sequence
  RPE65 RNA guide
cuucagaaucacaaacuuga

SEQ ID NO: 46620 - RNA, 20 nt, Artificial Sequence
  RPE65 RNA guide
cuucuucagaaucacaaacu

SEQ ID NO: 46621 - RNA, 20 nt, Artificial Sequence
  RPE65 RNA guide
gucaaguuugugauucugaa

SEQ ID NO: 46622 - RNA, 20 nt, Artificial Sequence
  RPE65 RNA guide
gugauucugaagaagaugug

SEQ ID NO: 46623 - RNA, 20 nt, Artificial Sequence
  RPE65 RNA guide
guuugugauucugaagaaga

SEQ ID NO: 46624 - RNA, 20 nt, Artificial Sequence
  RPE65 RNA guide
uaaacacaucuucuucagaa

SEQ ID NO: 46625 - RNA, 20 nt, Artificial Sequence
  RPE65 RNA guide
ucaaguuugugauucugaag

SEQ ID NO: 46626 - RNA, 20 nt, Artificial Sequence
  RPE65 RNA guide
ucuucagaaucacaaacuug

SEQ ID NO: 46627 - RNA, 20 nt, Artificial Sequence
  RPE65 RNA guide
ucuucuucagaaucacaaac

SEQ ID NO: 46628 - RNA, 20 nt, Artificial Sequence
  RPE65 RNA guide
ugucaaguuugugauucuga

SEQ ID NO: 46629 - RNA, 20 nt, Artificial Sequence
  RPE65 RNA guide
ugugauucugaagaagaugu

SEQ ID NO: 46630 - RNA, 20 nt, Artificial Sequence
  RPE65 RNA guide
uucuucagaaucacaaacuu

SEQ ID NO: 46631 - RNA, 20 nt, Artificial Sequence
  RPE65 RNA guide
uugucaaguuugugauucug

SEQ ID NO: 46632 - RNA, 20 nt, Artificial Sequence
  RPE65 RNA guide
uugugauucugaagaagaug

SEQ ID NO: 46633 - RNA, 20 nt, Artificial Sequence
  RPE65 RNA guide
uuugucaaguuugugauucu

SEQ ID NO: 46634 - RNA, 20 nt, Artificial Sequence
  RPE65 RNA guide
uuugugauucugaagaagau

SEQ ID NO: 46635 - RNA, 21 nt, Artificial Sequence
  RPE65 RNA guide
aaacacaucuucuucagaauc

SEQ ID NO: 46636 - RNA, 21 nt, Artificial Sequence
  RPE65 RNA guide
aacacaucuucuucagaauca

SEQ ID NO: 46637 - RNA, 21 nt, Artificial Sequence
  RPE65 RNA guide
aaguuugugauucugaagaag

SEQ ID NO: 46638 - RNA, 21 nt, Artificial Sequence
  RPE65 RNA guide
acacaucuucuucagaaucac

SEQ ID NO: 46639 - RNA, 21 nt, Artificial Sequence
  RPE65 RNA guide
acaucuucuucagaaucacaa

SEQ ID NO: 46640 - RNA, 21 nt, Artificial Sequence
  RPE65 RNA guide
aguuugugauucugaagaaga

SEQ ID NO: 46641 - RNA, 21 nt, Artificial Sequence
  RPE65 RNA guide
aucuucuucagaaucacaaac

SEQ ID NO: 46642 - RNA, 21 nt, Artificial Sequence
  RPE65 RNA guide
auuugucaaguuugugauucu

SEQ ID NO: 46643 - RNA, 21 nt, Artificial Sequence
  RPE65 RNA guide
caaguuugugauucugaagaa

SEQ ID NO: 46644 - RNA, 21 nt, Artificial Sequence
  RPE65 RNA guide
cacaucuucuucagaaucaca

SEQ ID NO: 46645 - RNA, 21 nt, Artificial Sequence
  RPE65 RNA guide
caucuucuucagaaucacaaa

SEQ ID NO: 46646 - RNA, 21 nt, Artificial Sequence
  RPE65 RNA guide
cuucagaaucacaaacuugac

SEQ ID NO: 46647 - RNA, 21 nt, Artificial Sequence
  RPE65 RNA guide
cuucuucagaaucacaaacuu

SEQ ID NO: 46648 - RNA, 21 nt, Artificial Sequence
  RPE65 RNA guide
gucaaguuugugauucugaag

SEQ ID NO: 46649 - RNA, 21 nt, Artificial Sequence
  RPE65 RNA guide
gugauucugaagaagaugugu

SEQ ID NO: 46650 - RNA, 21 nt, Artificial Sequence
  RPE65 RNA guide
guuugugauucugaagaagau

SEQ ID NO: 46651 - RNA, 21 nt, Artificial Sequence
  RPE65 RNA guide
uaaacacaucuucuucagaau

SEQ ID NO: 46652 - RNA, 21 nt, Artificial Sequence
  RPE65 RNA guide
ucaaguuugugauucugaaga

SEQ ID NO: 46653 - RNA, 21 nt, Artificial Sequence
  RPE65 RNA guide
ucuucagaaucacaaacuuga

SEQ ID NO: 46654 - RNA, 21 nt, Artificial Sequence
  RPE65 RNA guide
ucuucuucagaaucacaaacu

SEQ ID NO: 46655 - RNA, 21 nt, Artificial Sequence
  RPE65 RNA guide
ugucaaguuugugauucugaa

SEQ ID NO: 46656 - RNA, 21 nt, Artificial Sequence
  RPE65 RNA guide
ugugauucugaagaagaugug

SEQ ID NO: 46657 - RNA, 21 nt, Artificial Sequence
  RPE65 RNA guide
uuaaacacaucuucuucagaa

SEQ ID NO: 46658 - RNA, 21 nt, Artificial Sequence
  RPE65 RNA guide
uucuucagaaucacaaacuug

SEQ ID NO: 46659 - RNA, 21 nt, Artificial Sequence
  RPE65 RNA guide
uugucaaguuugugauucuga

SEQ ID NO: 46660 - RNA, 21 nt, Artificial Sequence
  RPE65 RNA guide
uugugauucugaagaagaugu

SEQ ID NO: 46661 - RNA, 21 nt, Artificial Sequence
  RPE65 RNA guide
uuugucaaguuugugauucug

SEQ ID NO: 46662 - RNA, 21 nt, Artificial Sequence
  RPE65 RNA guide
uuugugauucugaagaagaug

SEQ ID NO: 46663 - RNA, 22 nt, Artificial Sequence
  RPE65 RNA guide
aaacacaucuucuucagaauca

SEQ ID NO: 46664 - RNA, 22 nt, Artificial Sequence
  RPE65 RNA guide
aacacaucuucuucagaaucac

SEQ ID NO: 46665 - RNA, 22 nt, Artificial Sequence
  RPE65 RNA guide
aaguuugugauucugaagaaga

SEQ ID NO: 46666 - RNA, 22 nt, Artificial Sequence
  RPE65 RNA guide
acacaucuucuucagaaucaca

SEQ ID NO: 46667 - RNA, 22 nt, Artificial Sequence
  RPE65 RNA guide
acaucuucuucagaaucacaaa

SEQ ID NO: 46668 - RNA, 22 nt, Artificial Sequence
  RPE65 RNA guide
aguuugugauucugaagaagau

SEQ ID NO: 46669 - RNA, 22 nt, Artificial Sequence
  RPE65 RNA guide
aucuucuucagaaucacaaacu

SEQ ID NO: 46670 - RNA, 22 nt, Artificial Sequence
  RPE65 RNA guide
auuaaacacaucuucuucagaa

SEQ ID NO: 46671 - RNA, 22 nt, Artificial Sequence
  RPE65 RNA guide
auuugucaaguuugugauucug

SEQ ID NO: 46672 - RNA, 22 nt, Artificial Sequence
  RPE65 RNA guide
caaguuugugauucugaagaag

SEQ ID NO: 46673 - RNA, 22 nt, Artificial Sequence
  RPE65 RNA guide
cacaucuucuucagaaucacaa

SEQ ID NO: 46674 - RNA, 22 nt, Artificial Sequence
  RPE65 RNA guide
caucuucuucagaaucacaaac

SEQ ID NO: 46675 - RNA, 22 nt, Artificial Sequence
  RPE65 RNA guide
cuucagaaucacaaacuugaca

SEQ ID NO: 46676 - RNA, 22 nt, Artificial Sequence
  RPE65 RNA guide
cuucuucagaaucacaaacuug

SEQ ID NO: 46677 - RNA, 22 nt, Artificial Sequence
  RPE65 RNA guide
gucaaguuugugauucugaaga

SEQ ID NO: 46678 - RNA, 22 nt, Artificial Sequence
  RPE65 RNA guide
gugauucugaagaagauguguu

SEQ ID NO: 46679 - RNA, 22 nt, Artificial Sequence
  RPE65 RNA guide
guuugugauucugaagaagaug

SEQ ID NO: 46680 - RNA, 22 nt, Artificial Sequence
  RPE65 RNA guide
uaaacacaucuucuucagaauc

SEQ ID NO: 46681 - RNA, 22 nt, Artificial Sequence
  RPE65 RNA guide
uauuugucaaguuugugauucu

SEQ ID NO: 46682 - RNA, 22 nt, Artificial Sequence
  RPE65 RNA guide
ucaaguuugugauucugaagaa

SEQ ID NO: 46683 - RNA, 22 nt, Artificial Sequence
  RPE65 RNA guide
ucuucagaaucacaaacuugac

SEQ ID NO: 46684 - RNA, 22 nt, Artificial Sequence
  RPE65 RNA guide
ucuucuucagaaucacaaacuu

SEQ ID NO: 46685 - RNA, 22 nt, Artificial Sequence
  RPE65 RNA guide
ugucaaguuugugauucugaag

SEQ ID NO: 46686 - RNA, 22 nt, Artificial Sequence
  RPE65 RNA guide
ugugauucugaagaagaugugu

SEQ ID NO: 46687 - RNA, 22 nt, Artificial Sequence
  RPE65 RNA guide
uuaaacacaucuucuucagaau

SEQ ID NO: 46688 - RNA, 22 nt, Artificial Sequence
  RPE65 RNA guide
uucuucagaaucacaaacuuga

SEQ ID NO: 46689 - RNA, 22 nt, Artificial Sequence
  RPE65 RNA guide
uugucaaguuugugauucugaa

SEQ ID NO: 46690 - RNA, 22 nt, Artificial Sequence
  RPE65 RNA guide
uugugauucugaagaagaugug

SEQ ID NO: 46691 - RNA, 22 nt, Artificial Sequence
  RPE65 RNA guide
uuugucaaguuugugauucuga

SEQ ID NO: 46692 - RNA, 22 nt, Artificial Sequence
  RPE65 RNA guide
uuugugauucugaagaagaugu

SEQ ID NO: 46693 - RNA, 20 nt, Artificial Sequence
  RPE65 RNA guide
aaaaaccccguaauuuccag

SEQ ID NO: 46694 - RNA, 20 nt, Artificial Sequence
  RPE65 RNA guide
aaaaacgcaugucuuuuucu

SEQ ID NO: 46695 - RNA, 20 nt, Artificial Sequence
  RPE65 RNA guide
aaaaagacaugcguuuuuca

SEQ ID NO: 46696 - RNA, 20 nt, Artificial Sequence
  RPE65 RNA guide
aaaaaggcaagaaucaucuc

SEQ ID NO: 46697 - RNA, 20 nt, Artificial Sequence
  RPE65 RNA guide
aaaaagucaaacaugagcac

SEQ ID NO: 46698 - RNA, 20 nt, Artificial Sequence
  RPE65 RNA guide
aaaacaaaagauucugugac

SEQ ID NO: 46699 - RNA, 20 nt, Artificial Sequence
  RPE65 RNA guide
aaaaccccguaauuuccagg

SEQ ID NO: 46700 - RNA, 20 nt, Artificial Sequence
  RPE65 RNA guide
aaaacgcaugucuuuuucuc

SEQ ID NO: 46701 - RNA, 20 nt, Artificial Sequence
  RPE65 RNA guide
aaaacuaaucggguccauga

SEQ ID NO: 46702 - RNA, 20 nt, Artificial Sequence
  RPE65 RNA guide
aaaagacaugcguuuuucag

SEQ ID NO: 46703 - RNA, 20 nt, Artificial Sequence
  RPE65 RNA guide
aaaagauucugugaccugag

SEQ ID NO: 46704 - RNA, 20 nt, Artificial Sequence
  RPE65 RNA guide
aaaagcaguaggaaguuuag

SEQ ID NO: 46705 - RNA, 20 nt, Artificial Sequence
  RPE65 RNA guide
aaaaggcaagaaucaucucu

SEQ ID NO: 46706 - RNA, 20 nt, Artificial Sequence
  RPE65 RNA guide
aaaagucaaacaugagcaca

SEQ ID NO: 46707 - RNA, 20 nt, Artificial Sequence
  RPE65 RNA guide
aaaauaaagcaaccugcuua

SEQ ID NO: 46708 - RNA, 20 nt, Artificial Sequence
  RPE65 RNA guide
aaaauuauuugucauugccu

SEQ ID NO: 46709 - RNA, 20 nt, Artificial Sequence
  RPE65 RNA guide
aaacaaaagauucugugacc

SEQ ID NO: 46710 - RNA, 20 nt, Artificial Sequence
  RPE65 RNA guide
aaacaaauccauuaagcagg

SEQ ID NO: 46711 - RNA, 20 nt, Artificial Sequence
  RPE65 RNA guide
aaacagaauggugacaggaa

SEQ ID NO: 46712 - RNA, 20 nt, Artificial Sequence
  RPE65 RNA guide
aaacaugagcacaggcaaug

SEQ ID NO: 46713 - RNA, 20 nt, Artificial Sequence
  RPE65 RNA guide
aaaccccguaauuuccagga

SEQ ID NO: 46714 - RNA, 20 nt, Artificial Sequence
  RPE65 RNA guide
aaacgcaugucuuuuucucc

SEQ ID NO: 46715 - RNA, 20 nt, Artificial Sequence
  RPE65 RNA guide
aaacuaaucggguccaugaa

SEQ ID NO: 46716 - RNA, 20 nt, Artificial Sequence
  RPE65 RNA guide
aaacugcuauugagccaggu

SEQ ID NO: 46717 - RNA, 20 nt, Artificial Sequence
  RPE65 RNA guide
aaacuuccuacugcuuuucc

SEQ ID NO: 46718 - RNA, 20 nt, Artificial Sequence
  RPE65 RNA guide
aaacuugagccccaucuucu

SEQ ID NO: 46719 - RNA, 20 nt, Artificial Sequence
  RPE65 RNA guide
aaagaacaggcaggcacuug

SEQ ID NO: 46720 - RNA, 20 nt, Artificial Sequence
  RPE65 RNA guide
aaagacaugcguuuuucaga

SEQ ID NO: 46721 - RNA, 20 nt, Artificial Sequence
  RPE65 RNA guide
aaagauucugugaccugaga

SEQ ID NO: 46722 - RNA, 20 nt, Artificial Sequence
  RPE65 RNA guide
aaagcaaccugcuuaaugga

SEQ ID NO: 46723 - RNA, 20 nt, Artificial Sequence
  RPE65 RNA guide
aaagcaguaggaaguuuagg

SEQ ID NO: 46724 - RNA, 20 nt, Artificial Sequence
  RPE65 RNA guide
aaaggacacuggacaaaugg

SEQ ID NO: 46725 - RNA, 20 nt, Artificial Sequence
  RPE65 RNA guide
aaaggcaagaaucaucucuc

SEQ ID NO: 46726 - RNA, 20 nt, Artificial Sequence
  RPE65 RNA guide
aaaguaucucaaggcugcug

SEQ ID NO: 46727 - RNA, 20 nt, Artificial Sequence
  RPE65 RNA guide
aaagucaaacaugagcacag

SEQ ID NO: 46728 - RNA, 20 nt, Artificial Sequence
  RPE65 RNA guide
aaauaaagcaaccugcuuaa

SEQ ID NO: 46729 - RNA, 20 nt, Artificial Sequence
  RPE65 RNA guide
aaauccauuaagcagguugc

SEQ ID NO: 46730 - RNA, 20 nt, Artificial Sequence
  RPE65 RNA guide
aaauggcucugauacaccug

SEQ ID NO: 46731 - RNA, 20 nt, Artificial Sequence
  RPE65 RNA guide
aaaugggacaccucccauug

SEQ ID NO: 46732 - RNA, 20 nt, Artificial Sequence
  RPE65 RNA guide
aaauguaauuggaaaagcag

SEQ ID NO: 46733 - RNA, 20 nt, Artificial Sequence
  RPE65 RNA guide
aaauuacgggguuuuuacag

SEQ ID NO: 46734 - RNA, 20 nt, Artificial Sequence
  RPE65 RNA guide
aaauuauuugucauugccug

SEQ ID NO: 46735 - RNA, 20 nt, Artificial Sequence
  RPE65 RNA guide
aacaaaagauucugugaccu

SEQ ID NO: 46736 - RNA, 20 nt, Artificial Sequence
  RPE65 RNA guide
aacaaauccauuaagcaggu

SEQ ID NO: 46737 - RNA, 20 nt, Artificial Sequence
  RPE65 RNA guide
aacaaugggaggugucccau

SEQ ID NO: 46738 - RNA, 20 nt, Artificial Sequence
  RPE65 RNA guide
aacagaaaguaucucaaggc

SEQ ID NO: 46739 - RNA, 20 nt, Artificial Sequence
  RPE65 RNA guide
aacagaauggugacaggaag

SEQ ID NO: 46740 - RNA, 20 nt, Artificial Sequence
  RPE65 RNA guide
aacagcagccuugagauacu

SEQ ID NO: 46741 - RNA, 20 nt, Artificial Sequence
  RPE65 RNA guide
aacaggcaggcacuugugcu

SEQ ID NO: 46742 - RNA, 20 nt, Artificial Sequence
  RPE65 RNA guide
aacaugagcacaggcaauga

SEQ ID NO: 46743 - RNA, 20 nt, Artificial Sequence
  RPE65 RNA guide
aacccagaaacugcuauuga

SEQ ID NO: 46744 - RNA, 20 nt, Artificial Sequence
  RPE65 RNA guide
aaccccaccugaaaacaaaa

SEQ ID NO: 46745 - RNA, 20 nt, Artificial Sequence
  RPE65 RNA guide
aaccccguaauuuccaggaa

SEQ ID NO: 46746 - RNA, 20 nt, Artificial Sequence
  RPE65 RNA guide
aacgcaugucuuuuucuccc

SEQ ID NO: 46747 - RNA, 20 nt, Artificial Sequence
  RPE65 RNA guide
aacuaaucggguccaugaac

SEQ ID NO: 46748 - RNA, 20 nt, Artificial Sequence
  RPE65 RNA guide
aacucuugcuguuuuagaug

SEQ ID NO: 46749 - RNA, 20 nt, Artificial Sequence
  RPE65 RNA guide
aacugcuauugagccaggug

SEQ ID NO: 46750 - RNA, 20 nt, Artificial Sequence
  RPE65 RNA guide
aacuuaaaguugacaaaauc

SEQ ID NO: 46751 - RNA, 20 nt, Artificial Sequence
  RPE65 RNA guide
aacuuccuacugcuuuucca

SEQ ID NO: 46752 - RNA, 20 nt, Artificial Sequence
  RPE65 RNA guide
aacuugagccccaucuucuc

SEQ ID NO: 46753 - RNA, 20 nt, Artificial Sequence
  RPE65 RNA guide
aacuuuaaguucaccucuca

SEQ ID NO: 46754 - RNA, 20 nt, Artificial Sequence
  RPE65 RNA guide
aagaaaggacacuggacaaa

SEQ ID NO: 46755 - RNA, 20 nt, Artificial Sequence
  RPE65 RNA guide
aagaacaggcaggcacuugu

SEQ ID NO: 46756 - RNA, 20 nt, Artificial Sequence
  RPE65 RNA guide
aagacagaacagaaaguauc

SEQ ID NO: 46757 - RNA, 20 nt, Artificial Sequence
  RPE65 RNA guide
aagacaugcguuuuucagac

SEQ ID NO: 46758 - RNA, 20 nt, Artificial Sequence
  RPE65 RNA guide
aagauggggcucaaguuucc

SEQ ID NO: 46759 - RNA, 20 nt, Artificial Sequence
  RPE65 RNA guide
aagauucugugaccugagag

SEQ ID NO: 46760 - RNA, 20 nt, Artificial Sequence
  RPE65 RNA guide
aagcaaccugcuuaauggau

SEQ ID NO: 46761 - RNA, 20 nt, Artificial Sequence
  RPE65 RNA guide
aagcacaagugccugccugu

SEQ ID NO: 46762 - RNA, 20 nt, Artificial Sequence
  RPE65 RNA guide
aagcagguugcuuuauuuuc

SEQ ID NO: 46763 - RNA, 20 nt, Artificial Sequence
  RPE65 RNA guide
aagcaguaggaaguuuaggu

SEQ ID NO: 46764 - RNA, 20 nt, Artificial Sequence
  RPE65 RNA guide
aaggacacaaacagaauggu

SEQ ID NO: 46765 - RNA, 20 nt, Artificial Sequence
  RPE65 RNA guide
aaggacacuggacaaauggg

SEQ ID NO: 46766 - RNA, 20 nt, Artificial Sequence
  RPE65 RNA guide
aaggcaagaaucaucucucu

SEQ ID NO: 46767 - RNA, 20 nt, Artificial Sequence
  RPE65 RNA guide
aaggcugcuguuacuuaaac

SEQ ID NO: 46768 - RNA, 20 nt, Artificial Sequence
  RPE65 RNA guide
aagggagaaaaagacaugcg

SEQ ID NO: 46769 - RNA, 20 nt, Artificial Sequence
  RPE65 RNA guide
aaguaacagcagccuugaga

SEQ ID NO: 46770 - RNA, 20 nt, Artificial Sequence
  RPE65 RNA guide
aaguaucucaaggcugcugu

SEQ ID NO: 46771 - RNA, 20 nt, Artificial Sequence
  RPE65 RNA guide
aagucaaacaugagcacagg

SEQ ID NO: 46772 - RNA, 20 nt, Artificial Sequence
  RPE65 RNA guide
aagugccugccuguucuuua

SEQ ID NO: 46773 - RNA, 20 nt, Artificial Sequence
  RPE65 RNA guide
aaguucaccucucaggucac

SEQ ID NO: 46774 - RNA, 20 nt, Artificial Sequence
  RPE65 RNA guide
aauaaagaacaggcaggcac

SEQ ID NO: 46775 - RNA, 20 nt, Artificial Sequence
  RPE65 RNA guide
aauaaagcaaccugcuuaau

SEQ ID NO: 46776 - RNA, 20 nt, Artificial Sequence
  RPE65 RNA guide
aauagcaguuucuggguugu

SEQ ID NO: 46777 - RNA, 20 nt, Artificial Sequence
  RPE65 RNA guide
aaucacaucuaaaacagcaa

SEQ ID NO: 46778 - RNA, 20 nt, Artificial Sequence
  RPE65 RNA guide
aauccauuaagcagguugcu

SEQ ID NO: 46779 - RNA, 20 nt, Artificial Sequence
  RPE65 RNA guide
aaucggguccaugaacccca

SEQ ID NO: 46780 - RNA, 20 nt, Artificial Sequence
  RPE65 RNA guide
aaucugaaucacaucuaaaa

SEQ ID NO: 46781 - RNA, 20 nt, Artificial Sequence
  RPE65 RNA guide
aaucuuuuguuuucaggugg

SEQ ID NO: 46782 - RNA, 20 nt, Artificial Sequence
  RPE65 RNA guide
aaugauugaaaacuaaucgg

SEQ ID NO: 46783 - RNA, 20 nt, Artificial Sequence
  RPE65 RNA guide
aauggcucugauacaccugg

SEQ ID NO: 46784 - RNA, 20 nt, Artificial Sequence
  RPE65 RNA guide
aaugggacaccucccauugu

SEQ ID NO: 46785 - RNA, 20 nt, Artificial Sequence
  RPE65 RNA guide
aaugggaggugucccauuug

SEQ ID NO: 46786 - RNA, 20 nt, Artificial Sequence
  RPE65 RNA guide
aauggugacaggaagacaga

SEQ ID NO: 46787 - RNA, 20 nt, Artificial Sequence
  RPE65 RNA guide
aauguaauuggaaaagcagu

SEQ ID NO: 46788 - RNA, 20 nt, Artificial Sequence
  RPE65 RNA guide
aauuacgggguuuuuacaga

SEQ ID NO: 46789 - RNA, 20 nt, Artificial Sequence
  RPE65 RNA guide
aauuauuugucauugccugu

SEQ ID NO: 46790 - RNA, 20 nt, Artificial Sequence
  RPE65 RNA guide
aauuggaaaagcaguaggaa

SEQ ID NO: 46791 - RNA, 20 nt, Artificial Sequence
  RPE65 RNA guide
aauuuccaggaacaauggga

SEQ ID NO: 46792 - RNA, 20 nt, Artificial Sequence
  RPE65 RNA guide
aauuuuagagagaugauucu

SEQ ID NO: 46793 - RNA, 20 nt, Artificial Sequence
  RPE65 RNA guide
acaaaagauucugugaccug

SEQ ID NO: 46794 - RNA, 20 nt, Artificial Sequence
  RPE65 RNA guide
acaaacagaauggugacagg

SEQ ID NO: 46795 - RNA, 20 nt, Artificial Sequence
  RPE65 RNA guide
acaaauccauuaagcagguu

SEQ ID NO: 46796 - RNA, 20 nt, Artificial Sequence
  RPE65 RNA guide
acaaaugggacaccucccau

SEQ ID NO: 46797 - RNA, 20 nt, Artificial Sequence
  RPE65 RNA guide
acaacccagaaacugcuauu

SEQ ID NO: 46798 - RNA, 20 nt, Artificial Sequence
  RPE65 RNA guide
acaagugccugccuguucuu

SEQ ID NO: 46799 - RNA, 20 nt, Artificial Sequence
  RPE65 RNA guide
acaaugggaggugucccauu

SEQ ID NO: 46800 - RNA, 20 nt, Artificial Sequence
  RPE65 RNA guide
acacaaacagaauggugaca

SEQ ID NO: 46801 - RNA, 20 nt, Artificial Sequence
  RPE65 RNA guide
acacaggaugaaaauaaagc

SEQ ID NO: 46802 - RNA, 20 nt, Artificial Sequence
  RPE65 RNA guide
acaccucccauuguuccugg

SEQ ID NO: 46803 - RNA, 20 nt, Artificial Sequence
  RPE65 RNA guide
acaccuggcucaauagcagu

SEQ ID NO: 46804 - RNA, 20 nt, Artificial Sequence
  RPE65 RNA guide
acacuggacaaaugggacac

SEQ ID NO: 46805 - RNA, 20 nt, Artificial Sequence
  RPE65 RNA guide
acagaaaguaucucaaggcu

SEQ ID NO: 46806 - RNA, 20 nt, Artificial Sequence
  RPE65 RNA guide
acagaacagaaaguaucuca

SEQ ID NO: 46807 - RNA, 20 nt, Artificial Sequence
  RPE65 RNA guide
acagaaucuuuuguuuucag

SEQ ID NO: 46808 - RNA, 20 nt, Artificial Sequence
  RPE65 RNA guide
acagaauggugacaggaaga

SEQ ID NO: 46809 - RNA, 20 nt, Artificial Sequence
  RPE65 RNA guide
acagagcugcugcacucaau

SEQ ID NO: 46810 - RNA, 20 nt, Artificial Sequence
  RPE65 RNA guide
acagcagccuugagauacuu

SEQ ID NO: 46811 - RNA, 20 nt, Artificial Sequence
  RPE65 RNA guide
acaggaagacagaacagaaa

SEQ ID NO: 46812 - RNA, 20 nt, Artificial Sequence
  RPE65 RNA guide
acaggaugaaaauaaagcaa

SEQ ID NO: 46813 - RNA, 20 nt, Artificial Sequence
  RPE65 RNA guide
acaggcaggcacuugugcuu

SEQ ID NO: 46814 - RNA, 20 nt, Artificial Sequence
  RPE65 RNA guide
acaugagcacaggcaaugac

SEQ ID NO: 46815 - RNA, 20 nt, Artificial Sequence
  RPE65 RNA guide
acaugcguuuuucagacuag

SEQ ID NO: 46816 - RNA, 20 nt, Artificial Sequence
  RPE65 RNA guide
acccagaaacugcuauugag

SEQ ID NO: 46817 - RNA, 20 nt, Artificial Sequence
  RPE65 RNA guide
accccaccugaaaacaaaag

SEQ ID NO: 46818 - RNA, 20 nt, Artificial Sequence
  RPE65 RNA guide
accccguaauuuccaggaac

SEQ ID NO: 46819 - RNA, 20 nt, Artificial Sequence
  RPE65 RNA guide
accuaaacuuccuacugcuu

SEQ ID NO: 46820 - RNA, 20 nt, Artificial Sequence
  RPE65 RNA guide
accuaaggacacaaacagaa

SEQ ID NO: 46821 - RNA, 20 nt, Artificial Sequence
  RPE65 RNA guide
accucccauuguuccuggaa

SEQ ID NO: 46822 - RNA, 20 nt, Artificial Sequence
  RPE65 RNA guide
accucucaggucacagaauc

SEQ ID NO: 46823 - RNA, 20 nt, Artificial Sequence
  RPE65 RNA guide
accugaaaacaaaagauucu

SEQ ID NO: 46824 - RNA, 20 nt, Artificial Sequence
  RPE65 RNA guide
accugagaggugaacuuaaa

SEQ ID NO: 46825 - RNA, 20 nt, Artificial Sequence
  RPE65 RNA guide
accugcuuaauggauuuguu

SEQ ID NO: 46826 - RNA, 20 nt, Artificial Sequence
  RPE65 RNA guide
accuggcucaauagcaguuu

SEQ ID NO: 46827 - RNA, 20 nt, Artificial Sequence
  RPE65 RNA guide
acgcaugucuuuuucucccu

SEQ ID NO: 46828 - RNA, 20 nt, Artificial Sequence
  RPE65 RNA guide
acgggguuuuuacagagcug

SEQ ID NO: 46829 - RNA, 20 nt, Artificial Sequence
  RPE65 RNA guide
acuaaucggguccaugaacc

SEQ ID NO: 46830 - RNA, 20 nt, Artificial Sequence
  RPE65 RNA guide
acuagccaaaucacuaagaa

SEQ ID NO: 46831 - RNA, 20 nt, Artificial Sequence
  RPE65 RNA guide
acucuugcuguuuuagaugu

SEQ ID NO: 46832 - RNA, 20 nt, Artificial Sequence
  RPE65 RNA guide
acugcuauugagccaggugu

SEQ ID NO: 46833 - RNA, 20 nt, Artificial Sequence
  RPE65 RNA guide
acuggacaaaugggacaccu

SEQ ID NO: 46834 - RNA, 20 nt, Artificial Sequence
  RPE65 RNA guide
acuuaaacaaauccauuaag

SEQ ID NO: 46835 - RNA, 20 nt, Artificial Sequence
  RPE65 RNA guide
acuuccuacugcuuuuccaa

SEQ ID NO: 46836 - RNA, 20 nt, Artificial Sequence
  RPE65 RNA guide
acuugagccccaucuucucu

SEQ ID NO: 46837 - RNA, 20 nt, Artificial Sequence
  RPE65 RNA guide
acuugugcuuaaaaaggcaa

SEQ ID NO: 46838 - RNA, 20 nt, Artificial Sequence
  RPE65 RNA guide
acuuuaaguucaccucucag

SEQ ID NO: 46839 - RNA, 20 nt, Artificial Sequence
  RPE65 RNA guide
acuuucuguucugucuuccu

SEQ ID NO: 46840 - RNA, 20 nt, Artificial Sequence
  RPE65 RNA guide
agaaaaagacaugcguuuuu

SEQ ID NO: 46841 - RNA, 20 nt, Artificial Sequence
  RPE65 RNA guide
agaaacugcuauugagccag

SEQ ID NO: 46842 - RNA, 20 nt, Artificial Sequence
  RPE65 RNA guide
agaaaggacacuggacaaau

SEQ ID NO: 46843 - RNA, 20 nt, Artificial Sequence
  RPE65 RNA guide
agaaaguaucucaaggcugc

SEQ ID NO: 46844 - RNA, 20 nt, Artificial Sequence
  RPE65 RNA guide
agaacagaaaguaucucaag

SEQ ID NO: 46845 - RNA, 20 nt, Artificial Sequence
  RPE65 RNA guide
agaacaggcaggcacuugug

SEQ ID NO: 46846 - RNA, 20 nt, Artificial Sequence
  RPE65 RNA guide
agaagauggggcucaaguuu

SEQ ID NO: 46847 - RNA, 20 nt, Artificial Sequence
  RPE65 RNA guide
agaaucuuuuguuuucaggu

SEQ ID NO: 46848 - RNA, 20 nt, Artificial Sequence
  RPE65 RNA guide
agaauggugacaggaagaca

SEQ ID NO: 46849 - RNA, 20 nt, Artificial Sequence
  RPE65 RNA guide
agacagaacagaaaguaucu

SEQ ID NO: 46850 - RNA, 20 nt, Artificial Sequence
  RPE65 RNA guide
agacaugcguuuuucagacu

SEQ ID NO: 46851 - RNA, 20 nt, Artificial Sequence
  RPE65 RNA guide
agacuagccaaaucacuaag

SEQ ID NO: 46852 - RNA, 20 nt, Artificial Sequence
  RPE65 RNA guide
agagaagauggggcucaagu

SEQ ID NO: 46853 - RNA, 20 nt, Artificial Sequence
  RPE65 RNA guide
agagagaugauucuugccuu

SEQ ID NO: 46854 - RNA, 20 nt, Artificial Sequence
  RPE65 RNA guide
agagaugauucuugccuuuu

SEQ ID NO: 46855 - RNA, 20 nt, Artificial Sequence
  RPE65 RNA guide
agagccauuuccucccgccc

SEQ ID NO: 46856 - RNA, 20 nt, Artificial Sequence
  RPE65 RNA guide
agagcugcugcacucaaucu

SEQ ID NO: 46857 - RNA, 20 nt, Artificial Sequence
  RPE65 RNA guide
agaggugaacuuaaaguuga

SEQ ID NO: 46858 - RNA, 20 nt, Artificial Sequence
  RPE65 RNA guide
agauacuuucuguucugucu

SEQ ID NO: 46859 - RNA, 20 nt, Artificial Sequence
  RPE65 RNA guide
agaugauucuugccuuuuua

SEQ ID NO: 46860 - RNA, 20 nt, Artificial Sequence
  RPE65 RNA guide
agaugugauucagauugagu

SEQ ID NO: 46861 - RNA, 20 nt, Artificial Sequence
  RPE65 RNA guide
agauuaccuaaacuuccuac

SEQ ID NO: 46862 - RNA, 20 nt, Artificial Sequence
  RPE65 RNA guide
agauucugugaccugagagg

SEQ ID NO: 46863 - RNA, 20 nt, Artificial Sequence
  RPE65 RNA guide
agauugagugcagcagcucu

SEQ ID NO: 46864 - RNA, 20 nt, Artificial Sequence
  RPE65 RNA guide
agcaaccugcuuaauggauu

SEQ ID NO: 46865 - RNA, 20 nt, Artificial Sequence
  RPE65 RNA guide
agcacaagugccugccuguu

SEQ ID NO: 46866 - RNA, 20 nt, Artificial Sequence
  RPE65 RNA guide
agcacaggcaaugacaaaua

SEQ ID NO: 46867 - RNA, 20 nt, Artificial Sequence
  RPE65 RNA guide
agcagccuugagauacuuuc

SEQ ID NO: 46868 - RNA, 20 nt, Artificial Sequence
  RPE65 RNA guide
agcagcucuguaaaaacccc

SEQ ID NO: 46869 - RNA, 20 nt, Artificial Sequence
  RPE65 RNA guide
agcagguugcuuuauuuuca

SEQ ID NO: 46870 - RNA, 20 nt, Artificial Sequence
  RPE65 RNA guide
agcaguaggaaguuuaggua

SEQ ID NO: 46871 - RNA, 20 nt, Artificial Sequence
  RPE65 RNA guide
agcaguuucuggguugugga

SEQ ID NO: 46872 - RNA, 20 nt, Artificial Sequence
  RPE65 RNA guide
agccaaaucacuaagaagac

SEQ ID NO: 46873 - RNA, 20 nt, Artificial Sequence
  RPE65 RNA guide
agccagguguaucagagcca

SEQ ID NO: 46874 - RNA, 20 nt, Artificial Sequence
  RPE65 RNA guide
agccauuuccucccgcccac

SEQ ID NO: 46875 - RNA, 20 nt, Artificial Sequence
  RPE65 RNA guide
agccccaucuucucugcgaa

SEQ ID NO: 46876 - RNA, 20 nt, Artificial Sequence
  RPE65 RNA guide
agccuugagauacuuucugu

SEQ ID NO: 46877 - RNA, 20 nt, Artificial Sequence
  RPE65 RNA guide
agcucuguaaaaaccccgua

SEQ ID NO: 46878 - RNA, 20 nt, Artificial Sequence
  RPE65 RNA guide
agcugcugcacucaaucuga

SEQ ID NO: 46879 - RNA, 20 nt, Artificial Sequence
  RPE65 RNA guide
aggaaauggcucugauacac

SEQ ID NO: 46880 - RNA, 20 nt, Artificial Sequence
  RPE65 RNA guide
aggaacaaugggaggugucc

SEQ ID NO: 46881 - RNA, 20 nt, Artificial Sequence
  RPE65 RNA guide
aggaagacagaacagaaagu

SEQ ID NO: 46882 - RNA, 20 nt, Artificial Sequence
  RPE65 RNA guide
aggaaguuuagguaaucuga

SEQ ID NO: 46883 - RNA, 20 nt, Artificial Sequence
  RPE65 RNA guide
aggacacaaacagaauggug

SEQ ID NO: 46884 - RNA, 20 nt, Artificial Sequence
  RPE65 RNA guide
aggacacuggacaaauggga

SEQ ID NO: 46885 - RNA, 20 nt, Artificial Sequence
  RPE65 RNA guide
aggaugaaaauaaagcaacc

SEQ ID NO: 46886 - RNA, 20 nt, Artificial Sequence
  RPE65 RNA guide
aggcaagaaucaucucucua

SEQ ID NO: 46887 - RNA, 20 nt, Artificial Sequence
  RPE65 RNA guide
aggcacuugugcuuaaaaag

SEQ ID NO: 46888 - RNA, 20 nt, Artificial Sequence
  RPE65 RNA guide
aggcaggcacuugugcuuaa

SEQ ID NO: 46889 - RNA, 20 nt, Artificial Sequence
  RPE65 RNA guide
aggcugcuguuacuuaaaca

SEQ ID NO: 46890 - RNA, 20 nt, Artificial Sequence
  RPE65 RNA guide
agggagaaaaagacaugcgu

SEQ ID NO: 46891 - RNA, 20 nt, Artificial Sequence
  RPE65 RNA guide
aggucacagaaucuuuuguu

SEQ ID NO: 46892 - RNA, 20 nt, Artificial Sequence
  RPE65 RNA guide
aggugggguucauggacccg

SEQ ID NO: 46893 - RNA, 20 nt, Artificial Sequence
  RPE65 RNA guide
agguguaucagagccauuuc

SEQ ID NO: 46894 - RNA, 20 nt, Artificial Sequence
  RPE65 RNA guide
aggugucccauuuguccagu

SEQ ID NO: 46895 - RNA, 20 nt, Artificial Sequence
  RPE65 RNA guide
agguugcuuuauuuucaucc

SEQ ID NO: 46896 - RNA, 20 nt, Artificial Sequence
  RPE65 RNA guide
aguaacagcagccuugagau

SEQ ID NO: 46897 - RNA, 20 nt, Artificial Sequence
  RPE65 RNA guide
aguaggaaguuuagguaauc

SEQ ID NO: 46898 - RNA, 20 nt, Artificial Sequence
  RPE65 RNA guide
aguaucucaaggcugcuguu

SEQ ID NO: 46899 - RNA, 20 nt, Artificial Sequence
  RPE65 RNA guide
agucaaacaugagcacaggc

SEQ ID NO: 46900 - RNA, 20 nt, Artificial Sequence
  RPE65 RNA guide
agucugaaaaacgcaugucu

SEQ ID NO: 46901 - RNA, 20 nt, Artificial Sequence
  RPE65 RNA guide
agugauuuggcuagucugaa

SEQ ID NO: 46902 - RNA, 20 nt, Artificial Sequence
  RPE65 RNA guide
agugcagcagcucuguaaaa

SEQ ID NO: 46903 - RNA, 20 nt, Artificial Sequence
  RPE65 RNA guide
agugccugccuguucuuuau

SEQ ID NO: 46904 - RNA, 20 nt, Artificial Sequence
  RPE65 RNA guide
aguucaccucucaggucaca

SEQ ID NO: 46905 - RNA, 20 nt, Artificial Sequence
  RPE65 RNA guide
aguuucuggguuguggaaua

SEQ ID NO: 46906 - RNA, 20 nt, Artificial Sequence
  RPE65 RNA guide
auaaaaagucaaacaugagc

SEQ ID NO: 46907 - RNA, 20 nt, Artificial Sequence
  RPE65 RNA guide
auaaagaacaggcaggcacu

SEQ ID NO: 46908 - RNA, 20 nt, Artificial Sequence
  RPE65 RNA guide
auaaagcaaccugcuuaaug

SEQ ID NO: 46909 - RNA, 20 nt, Artificial Sequence
  RPE65 RNA guide
auaacucuugcuguuuuaga

SEQ ID NO: 46910 - RNA, 20 nt, Artificial Sequence
  RPE65 RNA guide
auacaccuggcucaauagca

SEQ ID NO: 46911 - RNA, 20 nt, Artificial Sequence
  RPE65 RNA guide
auacuuucuguucugucuuc

SEQ ID NO: 46912 - RNA, 20 nt, Artificial Sequence
  RPE65 RNA guide
auagcaguuucuggguugug

SEQ ID NO: 46913 - RNA, 20 nt, Artificial Sequence
  RPE65 RNA guide
aucacaucuaaaacagcaag

SEQ ID NO: 46914 - RNA, 20 nt, Artificial Sequence
  RPE65 RNA guide
aucagagccauuuccucccg

SEQ ID NO: 46915 - RNA, 20 nt, Artificial Sequence
  RPE65 RNA guide
auccauuaagcagguugcuu

SEQ ID NO: 46916 - RNA, 20 nt, Artificial Sequence
  RPE65 RNA guide
auccugugugggcgggagga

SEQ ID NO: 46917 - RNA, 20 nt, Artificial Sequence
  RPE65 RNA guide
aucggguccaugaaccccac

SEQ ID NO: 46918 - RNA, 20 nt, Artificial Sequence
  RPE65 RNA guide
aucucaaggcugcuguuacu

SEQ ID NO: 46919 - RNA, 20 nt, Artificial Sequence
  RPE65 RNA guide
aucugaaucacaucuaaaac

SEQ ID NO: 46920 - RNA, 20 nt, Artificial Sequence
  RPE65 RNA guide
aucuucucugcgaagggaga

SEQ ID NO: 46921 - RNA, 20 nt, Artificial Sequence
  RPE65 RNA guide
aucuuuuguuuucagguggg

SEQ ID NO: 46922 - RNA, 20 nt, Artificial Sequence
  RPE65 RNA guide
augaaccccaccugaaaaca

SEQ ID NO: 46923 - RNA, 20 nt, Artificial Sequence
  RPE65 RNA guide
augagcacaggcaaugacaa

SEQ ID NO: 46924 - RNA, 20 nt, Artificial Sequence
  RPE65 RNA guide
augauucuugccuuuuuaag

SEQ ID NO: 46925 - RNA, 20 nt, Artificial Sequence
  RPE65 RNA guide
augauugaaaacuaaucggg

SEQ ID NO: 46926 - RNA, 20 nt, Artificial Sequence
  RPE65 RNA guide
augcguuuuucagacuagcc

SEQ ID NO: 46927 - RNA, 20 nt, Artificial Sequence
  RPE65 RNA guide
auggacccgauuaguuuuca

SEQ ID NO: 46928 - RNA, 20 nt, Artificial Sequence
  RPE65 RNA guide
auggauuuguuuaaguaaca

SEQ ID NO: 46929 - RNA, 20 nt, Artificial Sequence
  RPE65 RNA guide
auggcucugauacaccuggc

SEQ ID NO: 46930 - RNA, 20 nt, Artificial Sequence
  RPE65 RNA guide
augggacaccucccauuguu

SEQ ID NO: 46931 - RNA, 20 nt, Artificial Sequence
  RPE65 RNA guide
augggaggugucccauuugu

SEQ ID NO: 46932 - RNA, 20 nt, Artificial Sequence
  RPE65 RNA guide
auggugacaggaagacagaa

SEQ ID NO: 46933 - RNA, 20 nt, Artificial Sequence
  RPE65 RNA guide
auguaauuggaaaagcagua

SEQ ID NO: 46934 - RNA, 20 nt, Artificial Sequence
  RPE65 RNA guide
augucuuuuucucccuucgc

SEQ ID NO: 46935 - RNA, 20 nt, Artificial Sequence
  RPE65 RNA guide
augugauucagauugagugc

SEQ ID NO: 46936 - RNA, 20 nt, Artificial Sequence
  RPE65 RNA guide
auguucagauuaccuaaacu

SEQ ID NO: 46937 - RNA, 20 nt, Artificial Sequence
  RPE65 RNA guide
auuaccuaaacuuccuacug

SEQ ID NO: 46938 - RNA, 20 nt, Artificial Sequence
  RPE65 RNA guide
auuacgggguuuuuacagag

SEQ ID NO: 46939 - RNA, 20 nt, Artificial Sequence
  RPE65 RNA guide
auuauuugucauugccugug

SEQ ID NO: 46940 - RNA, 20 nt, Artificial Sequence
  RPE65 RNA guide
auucagauugagugcagcag

SEQ ID NO: 46941 - RNA, 20 nt, Artificial Sequence
  RPE65 RNA guide
auuccacaacccagaaacug

SEQ ID NO: 46942 - RNA, 20 nt, Artificial Sequence
  RPE65 RNA guide
auucugugaccugagaggug

SEQ ID NO: 46943 - RNA, 20 nt, Artificial Sequence
  RPE65 RNA guide
auucuugccuuuuuaagcac

SEQ ID NO: 46944 - RNA, 20 nt, Artificial Sequence
  RPE65 RNA guide
auugaaaacuaaucgggucc

SEQ ID NO: 46945 - RNA, 20 nt, Artificial Sequence
  RPE65 RNA guide
auugagccagguguaucaga

SEQ ID NO: 46946 - RNA, 20 nt, Artificial Sequence
  RPE65 RNA guide
auugagugcagcagcucugu

SEQ ID NO: 46947 - RNA, 20 nt, Artificial Sequence
  RPE65 RNA guide
auugccugugcucauguuug

SEQ ID NO: 46948 - RNA, 20 nt, Artificial Sequence
  RPE65 RNA guide
auuggaaaagcaguaggaag

SEQ ID NO: 46949 - RNA, 20 nt, Artificial Sequence
  RPE65 RNA guide
auuguuccuggaaauuacgg

SEQ ID NO: 46950 - RNA, 20 nt, Artificial Sequence
  RPE65 RNA guide
auuuccaggaacaaugggag

SEQ ID NO: 46951 - RNA, 20 nt, Artificial Sequence
  RPE65 RNA guide
auuuccucccgcccacacag

SEQ ID NO: 46952 - RNA, 20 nt, Artificial Sequence
  RPE65 RNA guide
auuuggcuagucugaaaaac

SEQ ID NO: 46953 - RNA, 20 nt, Artificial Sequence
  RPE65 RNA guide
auuugucauugccugugcuc

SEQ ID NO: 46954 - RNA, 20 nt, Artificial Sequence
  RPE65 RNA guide
auuuguuuaaguaacagcag

SEQ ID NO: 46955 - RNA, 20 nt, Artificial Sequence
  RPE65 RNA guide
auuuuagagagaugauucuu

SEQ ID NO: 46956 - RNA, 20 nt, Artificial Sequence
  RPE65 RNA guide
auuuucauccugugugggcg

SEQ ID NO: 46957 - RNA, 20 nt, Artificial Sequence
  RPE65 RNA guide
caaaagauucugugaccuga

SEQ ID NO: 46958 - RNA, 20 nt, Artificial Sequence
  RPE65 RNA guide
caaacagaauggugacagga

SEQ ID NO: 46959 - RNA, 20 nt, Artificial Sequence
  RPE65 RNA guide
caaacaugagcacaggcaau

SEQ ID NO: 46960 - RNA, 20 nt, Artificial Sequence
  RPE65 RNA guide
caaauccauuaagcagguug

SEQ ID NO: 46961 - RNA, 20 nt, Artificial Sequence
  RPE65 RNA guide
caaaugggacaccucccauu

SEQ ID NO: 46962 - RNA, 20 nt, Artificial Sequence
  RPE65 RNA guide
caacccagaaacugcuauug

SEQ ID NO: 46963 - RNA, 20 nt, Artificial Sequence
  RPE65 RNA guide
caaccugcuuaauggauuug

SEQ ID NO: 46964 - RNA, 20 nt, Artificial Sequence
  RPE65 RNA guide
caacuuuaaguucaccucuc

SEQ ID NO: 46965 - RNA, 20 nt, Artificial Sequence
  RPE65 RNA guide
caaggcugcuguuacuuaaa

SEQ ID NO: 46966 - RNA, 20 nt, Artificial Sequence
  RPE65 RNA guide
caagugccugccuguucuuu

SEQ ID NO: 46967 - RNA, 20 nt, Artificial Sequence
  RPE65 RNA guide
caauagcaguuucuggguug

SEQ ID NO: 46968 - RNA, 20 nt, Artificial Sequence
  RPE65 RNA guide
caaucugaaucacaucuaaa

SEQ ID NO: 46969 - RNA, 20 nt, Artificial Sequence
  RPE65 RNA guide
caaugggaggugucccauuu

SEQ ID NO: 46970 - RNA, 20 nt, Artificial Sequence
  RPE65 RNA guide
cacaaacagaauggugacag

SEQ ID NO: 46971 - RNA, 20 nt, Artificial Sequence
  RPE65 RNA guide
cacaacccagaaacugcuau

SEQ ID NO: 46972 - RNA, 20 nt, Artificial Sequence
  RPE65 RNA guide
cacaagugccugccuguucu

SEQ ID NO: 46973 - RNA, 20 nt, Artificial Sequence
  RPE65 RNA guide
cacacaggaugaaaauaaag

SEQ ID NO: 46974 - RNA, 20 nt, Artificial Sequence
  RPE65 RNA guide
cacagaaucuuuuguuuuca

SEQ ID NO: 46975 - RNA, 20 nt, Artificial Sequence
  RPE65 RNA guide
cacaggaugaaaauaaagca

SEQ ID NO: 46976 - RNA, 20 nt, Artificial Sequence
  RPE65 RNA guide
caccauucuguuuguguccu

SEQ ID NO: 46977 - RNA, 20 nt, Artificial Sequence
  RPE65 RNA guide
caccucccauuguuccugga

SEQ ID NO: 46978 - RNA, 20 nt, Artificial Sequence
  RPE65 RNA guide
caccucucaggucacagaau

SEQ ID NO: 46979 - RNA, 20 nt, Artificial Sequence
  RPE65 RNA guide
caccugaaaacaaaagauuc

SEQ ID NO: 46980 - RNA, 20 nt, Artificial Sequence
  RPE65 RNA guide
caccuggcucaauagcaguu

SEQ ID NO: 46981 - RNA, 20 nt, Artificial Sequence
  RPE65 RNA guide
cacucaaucugaaucacauc

SEQ ID NO: 46982 - RNA, 20 nt, Artificial Sequence
  RPE65 RNA guide
cacuggacaaaugggacacc

SEQ ID NO: 46983 - RNA, 20 nt, Artificial Sequence
  RPE65 RNA guide
cacuugugcuuaaaaaggca

SEQ ID NO: 46984 - RNA, 20 nt, Artificial Sequence
  RPE65 RNA guide
cagaaacugcuauugagcca

SEQ ID NO: 46985 - RNA, 20 nt, Artificial Sequence
  RPE65 RNA guide
cagaaaguaucucaaggcug

SEQ ID NO: 46986 - RNA, 20 nt, Artificial Sequence
  RPE65 RNA guide
cagaacagaaaguaucucaa

SEQ ID NO: 46987 - RNA, 20 nt, Artificial Sequence
  RPE65 RNA guide
cagaaucuuuuguuuucagg

SEQ ID NO: 46988 - RNA, 20 nt, Artificial Sequence
  RPE65 RNA guide
cagaauggugacaggaagac

SEQ ID NO: 46989 - RNA, 20 nt, Artificial Sequence
  RPE65 RNA guide
cagacuagccaaaucacuaa

SEQ ID NO: 46990 - RNA, 20 nt, Artificial Sequence
  RPE65 RNA guide
cagagaagauggggcucaag

SEQ ID NO: 46991 - RNA, 20 nt, Artificial Sequence
  RPE65 RNA guide
cagagccauuuccucccgcc

SEQ ID NO: 46992 - RNA, 20 nt, Artificial Sequence
  RPE65 RNA guide
cagagcugcugcacucaauc

SEQ ID NO: 46993 - RNA, 20 nt, Artificial Sequence
  RPE65 RNA guide
cagauuaccuaaacuuccua

SEQ ID NO: 46994 - RNA, 20 nt, Artificial Sequence
  RPE65 RNA guide
cagauugagugcagcagcuc

SEQ ID NO: 46995 - RNA, 20 nt, Artificial Sequence
  RPE65 RNA guide
cagcagccuugagauacuuu

SEQ ID NO: 46996 - RNA, 20 nt, Artificial Sequence
  RPE65 RNA guide
cagcagcucuguaaaaaccc

SEQ ID NO: 46997 - RNA, 20 nt, Artificial Sequence
  RPE65 RNA guide
cagccuugagauacuuucug

SEQ ID NO: 46998 - RNA, 20 nt, Artificial Sequence
  RPE65 RNA guide
cagcucuguaaaaaccccgu

SEQ ID NO: 46999 - RNA, 20 nt, Artificial Sequence
  RPE65 RNA guide
caggaacaaugggagguguc

SEQ ID NO: 47000 - RNA, 20 nt, Artificial Sequence
  RPE65 RNA guide
caggaagacagaacagaaag

SEQ ID NO: 47001 - RNA, 20 nt, Artificial Sequence
  RPE65 RNA guide
caggaugaaaauaaagcaac

SEQ ID NO: 47002 - RNA, 20 nt, Artificial Sequence
  RPE65 RNA guide
caggcacuugugcuuaaaaa

SEQ ID NO: 47003 - RNA, 20 nt, Artificial Sequence
  RPE65 RNA guide
caggcaggcacuugugcuua

SEQ ID NO: 47004 - RNA, 20 nt, Artificial Sequence
  RPE65 RNA guide
caggucacagaaucuuuugu

SEQ ID NO: 47005 - RNA, 20 nt, Artificial Sequence
  RPE65 RNA guide
caggugggguucauggaccc

SEQ ID NO: 47006 - RNA, 20 nt, Artificial Sequence
  RPE65 RNA guide
cagguguaucagagccauuu

SEQ ID NO: 47007 - RNA, 20 nt, Artificial Sequence
  RPE65 RNA guide
cagguugcuuuauuuucauc

SEQ ID NO: 47008 - RNA, 20 nt, Artificial Sequence
  RPE65 RNA guide
caguaggaaguuuagguaau

SEQ ID NO: 47009 - RNA, 20 nt, Artificial Sequence
  RPE65 RNA guide
caguuucuggguuguggaau

SEQ ID NO: 47010 - RNA, 20 nt, Artificial Sequence
  RPE65 RNA guide
cauaguuuugauguucagau

SEQ ID NO: 47011 - RNA, 20 nt, Artificial Sequence
  RPE65 RNA guide
cauccugugugggcgggagg

SEQ ID NO: 47012 - RNA, 20 nt, Artificial Sequence
  RPE65 RNA guide
caucuucucugcgaagggag

SEQ ID NO: 47013 - RNA, 20 nt, Artificial Sequence
  RPE65 RNA guide
caugaaccccaccugaaaac

SEQ ID NO: 47014 - RNA, 20 nt, Artificial Sequence
  RPE65 RNA guide
caugagcacaggcaaugaca

SEQ ID NO: 47015 - RNA, 20 nt, Artificial Sequence
  RPE65 RNA guide
caugcguuuuucagacuagc

SEQ ID NO: 47016 - RNA, 20 nt, Artificial Sequence
  RPE65 RNA guide
cauggacccgauuaguuuuc

SEQ ID NO: 47017 - RNA, 20 nt, Artificial Sequence
  RPE65 RNA guide
caugucuuuuucucccuucg

SEQ ID NO: 47018 - RNA, 20 nt, Artificial Sequence
  RPE65 RNA guide
cauuaagcagguugcuuuau

SEQ ID NO: 47019 - RNA, 20 nt, Artificial Sequence
  RPE65 RNA guide
cauugccugugcucauguuu

SEQ ID NO: 47020 - RNA, 20 nt, Artificial Sequence
  RPE65 RNA guide
cauuguuccuggaaauuacg

SEQ ID NO: 47021 - RNA, 20 nt, Artificial Sequence
  RPE65 RNA guide
cauuuccucccgcccacaca

SEQ ID NO: 47022 - RNA, 20 nt, Artificial Sequence
  RPE65 RNA guide
cauuuguccaguguccuuuc

SEQ ID NO: 47023 - RNA, 20 nt, Artificial Sequence
  RPE65 RNA guide
ccaaaucacuaagaagacaa

SEQ ID NO: 47024 - RNA, 20 nt, Artificial Sequence
  RPE65 RNA guide
ccacaacccagaaacugcua

SEQ ID NO: 47025 - RNA, 20 nt, Artificial Sequence
  RPE65 RNA guide
ccacacaggaugaaaauaaa

SEQ ID NO: 47026 - RNA, 20 nt, Artificial Sequence
  RPE65 RNA guide
ccaccugaaaacaaaagauu

SEQ ID NO: 47027 - RNA, 20 nt, Artificial Sequence
  RPE65 RNA guide
ccagaaacugcuauugagcc

SEQ ID NO: 47028 - RNA, 20 nt, Artificial Sequence
  RPE65 RNA guide
ccaggaacaaugggaggugu

SEQ ID NO: 47029 - RNA, 20 nt, Artificial Sequence
  RPE65 RNA guide
ccagguguaucagagccauu

SEQ ID NO: 47030 - RNA, 20 nt, Artificial Sequence
  RPE65 RNA guide
ccaucuucucugcgaaggga

SEQ ID NO: 47031 - RNA, 20 nt, Artificial Sequence
  RPE65 RNA guide
ccaugaaccccaccugaaaa

SEQ ID NO: 47032 - RNA, 20 nt, Artificial Sequence
  RPE65 RNA guide
ccauuaagcagguugcuuua

SEQ ID NO: 47033 - RNA, 20 nt, Artificial Sequence
  RPE65 RNA guide
ccauuguuccuggaaauuac

SEQ ID NO: 47034 - RNA, 20 nt, Artificial Sequence
  RPE65 RNA guide
ccauuuccucccgcccacac

SEQ ID NO: 47035 - RNA, 20 nt, Artificial Sequence
  RPE65 RNA guide
ccauuuguccaguguccuuu

SEQ ID NO: 47036 - RNA, 20 nt, Artificial Sequence
  RPE65 RNA guide
cccacacaggaugaaaauaa

SEQ ID NO: 47037 - RNA, 20 nt, Artificial Sequence
  RPE65 RNA guide
cccaccugaaaacaaaagau

SEQ ID NO: 47038 - RNA, 20 nt, Artificial Sequence
  RPE65 RNA guide
cccagaaacugcuauugagc

SEQ ID NO: 47039 - RNA, 20 nt, Artificial Sequence
  RPE65 RNA guide
cccaucuucucugcgaaggg

SEQ ID NO: 47040 - RNA, 20 nt, Artificial Sequence
  RPE65 RNA guide
cccauuguuccuggaaauua

SEQ ID NO: 47041 - RNA, 20 nt, Artificial Sequence
  RPE65 RNA guide
cccauuuguccaguguccuu

SEQ ID NO: 47042 - RNA, 20 nt, Artificial Sequence
  RPE65 RNA guide
ccccaccugaaaacaaaaga

SEQ ID NO: 47043 - RNA, 20 nt, Artificial Sequence
  RPE65 RNA guide
ccccaucuucucugcgaagg

SEQ ID NO: 47044 - RNA, 20 nt, Artificial Sequence
  RPE65 RNA guide
ccccguaauuuccaggaaca

SEQ ID NO: 47045 - RNA, 20 nt, Artificial Sequence
  RPE65 RNA guide
cccgcccacacaggaugaaa

SEQ ID NO: 47046 - RNA, 20 nt, Artificial Sequence
  RPE65 RNA guide
cccguaauuuccaggaacaa

SEQ ID NO: 47047 - RNA, 20 nt, Artificial Sequence
  RPE65 RNA guide
cccuucgcagagaagauggg

SEQ ID NO: 47048 - RNA, 20 nt, Artificial Sequence
  RPE65 RNA guide
ccgcccacacaggaugaaaa

SEQ ID NO: 47049 - RNA, 20 nt, Artificial Sequence
  RPE65 RNA guide
ccguaauuuccaggaacaau

SEQ ID NO: 47050 - RNA, 20 nt, Artificial Sequence
  RPE65 RNA guide
ccuaaacuuccuacugcuuu

SEQ ID NO: 47051 - RNA, 20 nt, Artificial Sequence
  RPE65 RNA guide
ccuaaggacacaaacagaau

SEQ ID NO: 47052 - RNA, 20 nt, Artificial Sequence
  RPE65 RNA guide
ccuacugcuuuuccaauuac

SEQ ID NO: 47053 - RNA, 20 nt, Artificial Sequence
  RPE65 RNA guide
ccucccauuguuccuggaaa

SEQ ID NO: 47054 - RNA, 20 nt, Artificial Sequence
  RPE65 RNA guide
ccucccgcccacacaggaug

SEQ ID NO: 47055 - RNA, 20 nt, Artificial Sequence
  RPE65 RNA guide
ccucucaggucacagaaucu

SEQ ID NO: 47056 - RNA, 20 nt, Artificial Sequence
  RPE65 RNA guide
ccugaaaacaaaagauucug

SEQ ID NO: 47057 - RNA, 20 nt, Artificial Sequence
  RPE65 RNA guide
ccugagaggugaacuuaaag

SEQ ID NO: 47058 - RNA, 20 nt, Artificial Sequence
  RPE65 RNA guide
ccugccuguucuuuauucca

SEQ ID NO: 47059 - RNA, 20 nt, Artificial Sequence
  RPE65 RNA guide
ccugcuuaauggauuuguuu

SEQ ID NO: 47060 - RNA, 20 nt, Artificial Sequence
  RPE65 RNA guide
ccuggaaauuacgggguuuu

SEQ ID NO: 47061 - RNA, 20 nt, Artificial Sequence
  RPE65 RNA guide
ccuggcucaauagcaguuuc

SEQ ID NO: 47062 - RNA, 20 nt, Artificial Sequence
  RPE65 RNA guide
ccuggggaaacuugagcccc

SEQ ID NO: 47063 - RNA, 20 nt, Artificial Sequence
  RPE65 RNA guide
ccugucaccauucuguuugu

SEQ ID NO: 47064 - RNA, 20 nt, Artificial Sequence
  RPE65 RNA guide
ccugugcucauguuugacuu

SEQ ID NO: 47065 - RNA, 20 nt, Artificial Sequence
  RPE65 RNA guide
ccugugugggcgggaggaaa

SEQ ID NO: 47066 - RNA, 20 nt, Artificial Sequence
  RPE65 RNA guide
ccuguucuuuauuccacaac

SEQ ID NO: 47067 - RNA, 20 nt, Artificial Sequence
  RPE65 RNA guide
ccuucgcagagaagaugggg

SEQ ID NO: 47068 - RNA, 20 nt, Artificial Sequence
  RPE65 RNA guide
ccuugagauacuuucuguuc

SEQ ID NO: 47069 - RNA, 20 nt, Artificial Sequence
  RPE65 RNA guide
ccuuuuuaagcacaagugcc

SEQ ID NO: 47070 - RNA, 20 nt, Artificial Sequence
  RPE65 RNA guide
cgaagggagaaaaagacaug

SEQ ID NO: 47071 - RNA, 20 nt, Artificial Sequence
  RPE65 RNA guide
cgcagagaagauggggcuca

SEQ ID NO: 47072 - RNA, 20 nt, Artificial Sequence
  RPE65 RNA guide
cgcaugucuuuuucucccuu

SEQ ID NO: 47073 - RNA, 20 nt, Artificial Sequence
  RPE65 RNA guide
cgcccacacaggaugaaaau

SEQ ID NO: 47074 - RNA, 20 nt, Artificial Sequence
  RPE65 RNA guide
cgggaggaaauggcucugau

SEQ ID NO: 47075 - RNA, 20 nt, Artificial Sequence
  RPE65 RNA guide
cgggguuuuuacagagcugc

SEQ ID NO: 47076 - RNA, 20 nt, Artificial Sequence
  RPE65 RNA guide
cggguccaugaaccccaccu

SEQ ID NO: 47077 - RNA, 20 nt, Artificial Sequence
  RPE65 RNA guide
cguaauuuccaggaacaaug

SEQ ID NO: 47078 - RNA, 20 nt, Artificial Sequence
  RPE65 RNA guide
cguuuuucagacuagccaaa

SEQ ID NO: 47079 - RNA, 20 nt, Artificial Sequence
  RPE65 RNA guide
cuaaacuuccuacugcuuuu

SEQ ID NO: 47080 - RNA, 20 nt, Artificial Sequence
  RPE65 RNA guide
cuaaggacacaaacagaaug

SEQ ID NO: 47081 - RNA, 20 nt, Artificial Sequence
  RPE65 RNA guide
cuaaucggguccaugaaccc

SEQ ID NO: 47082 - RNA, 20 nt, Artificial Sequence
  RPE65 RNA guide
cuagccaaaucacuaagaag

SEQ ID NO: 47083 - RNA, 20 nt, Artificial Sequence
  RPE65 RNA guide
cuagucugaaaaacgcaugu

SEQ ID NO: 47084 - RNA, 20 nt, Artificial Sequence
  RPE65 RNA guide
cuauugagccagguguauca

SEQ ID NO: 47085 - RNA, 20 nt, Artificial Sequence
  RPE65 RNA guide
cucaaggcugcuguuacuua

SEQ ID NO: 47086 - RNA, 20 nt, Artificial Sequence
  RPE65 RNA guide
cucaauagcaguuucugggu

SEQ ID NO: 47087 - RNA, 20 nt, Artificial Sequence
  RPE65 RNA guide
cucaaucugaaucacaucua

SEQ ID NO: 47088 - RNA, 20 nt, Artificial Sequence
  RPE65 RNA guide
cucaggucacagaaucuuuu

SEQ ID NO: 47089 - RNA, 20 nt, Artificial Sequence
  RPE65 RNA guide
cucccauuguuccuggaaau

SEQ ID NO: 47090 - RNA, 20 nt, Artificial Sequence
  RPE65 RNA guide
cucccgcccacacaggauga

SEQ ID NO: 47091 - RNA, 20 nt, Artificial Sequence
  RPE65 RNA guide
cucccuucgcagagaagaug

SEQ ID NO: 47092 - RNA, 20 nt, Artificial Sequence
  RPE65 RNA guide
cucucaggucacagaaucuu

SEQ ID NO: 47093 - RNA, 20 nt, Artificial Sequence
  RPE65 RNA guide
cucugauacaccuggcucaa

SEQ ID NO: 47094 - RNA, 20 nt, Artificial Sequence
  RPE65 RNA guide
cucugcgaagggagaaaaag

SEQ ID NO: 47095 - RNA, 20 nt, Artificial Sequence
  RPE65 RNA guide
cucuguaaaaaccccguaau

SEQ ID NO: 47096 - RNA, 20 nt, Artificial Sequence
  RPE65 RNA guide
cucuugcuguuuuagaugug

SEQ ID NO: 47097 - RNA, 20 nt, Artificial Sequence
  RPE65 RNA guide
cugaaaaacgcaugucuuuu

SEQ ID NO: 47098 - RNA, 20 nt, Artificial Sequence
  RPE65 RNA guide
cugaaaacaaaagauucugu

SEQ ID NO: 47099 - RNA, 20 nt, Artificial Sequence
  RPE65 RNA guide
cugaaucacaucuaaaacag

SEQ ID NO: 47100 - RNA, 20 nt, Artificial Sequence
  RPE65 RNA guide
cugagaggugaacuuaaagu

SEQ ID NO: 47101 - RNA, 20 nt, Artificial Sequence
  RPE65 RNA guide
cugauacaccuggcucaaua

SEQ ID NO: 47102 - RNA, 20 nt, Artificial Sequence
  RPE65 RNA guide
cugcacucaaucugaaucac

SEQ ID NO: 47103 - RNA, 20 nt, Artificial Sequence
  RPE65 RNA guide
cugccuguucuuuauuccac

SEQ ID NO: 47104 - RNA, 20 nt, Artificial Sequence
  RPE65 RNA guide
cugcgaagggagaaaaagac

SEQ ID NO: 47105 - RNA, 20 nt, Artificial Sequence
  RPE65 RNA guide
cugcuauugagccaggugua

SEQ ID NO: 47106 - RNA, 20 nt, Artificial Sequence
  RPE65 RNA guide
cugcugcacucaaucugaau

SEQ ID NO: 47107 - RNA, 20 nt, Artificial Sequence
  RPE65 RNA guide
cugcuguuacuuaaacaaau

SEQ ID NO: 47108 - RNA, 20 nt, Artificial Sequence
  RPE65 RNA guide
cuggaaauuacgggguuuuu

SEQ ID NO: 47109 - RNA, 20 nt, Artificial Sequence
  RPE65 RNA guide
cuggacaaaugggacaccuc

SEQ ID NO: 47110 - RNA, 20 nt, Artificial Sequence
  RPE65 RNA guide
cuggcucaauagcaguuucu

SEQ ID NO: 47111 - RNA, 20 nt, Artificial Sequence
  RPE65 RNA guide
cuggggaaacuugagcccca

SEQ ID NO: 47112 - RNA, 20 nt, Artificial Sequence
  RPE65 RNA guide
cuggguuguggaauaaagaa

SEQ ID NO: 47113 - RNA, 20 nt, Artificial Sequence
  RPE65 RNA guide
cuguaaaaaccccguaauuu

SEQ ID NO: 47114 - RNA, 20 nt, Artificial Sequence
  RPE65 RNA guide
cugucaccauucuguuugug

SEQ ID NO: 47115 - RNA, 20 nt, Artificial Sequence
  RPE65 RNA guide
cugucuuccugucaccauuc

SEQ ID NO: 47116 - RNA, 20 nt, Artificial Sequence
  RPE65 RNA guide
cugugaccugagaggugaac

SEQ ID NO: 47117 - RNA, 20 nt, Artificial Sequence
  RPE65 RNA guide
cugugcucauguuugacuuu

SEQ ID NO: 47118 - RNA, 20 nt, Artificial Sequence
  RPE65 RNA guide
cugugugggcgggaggaaau

SEQ ID NO: 47119 - RNA, 20 nt, Artificial Sequence
  RPE65 RNA guide
cuguucugucuuccugucac

SEQ ID NO: 47120 - RNA, 20 nt, Artificial Sequence
  RPE65 RNA guide
cuguucuuuauuccacaacc

SEQ ID NO: 47121 - RNA, 20 nt, Artificial Sequence
  RPE65 RNA guide
cuguugucuucuuagugauu

SEQ ID NO: 47122 - RNA, 20 nt, Artificial Sequence
  RPE65 RNA guide
cuguuuuagaugugauucag

SEQ ID NO: 47123 - RNA, 20 nt, Artificial Sequence
  RPE65 RNA guide
cuuaaaaaggcaagaaucau

SEQ ID NO: 47124 - RNA, 20 nt, Artificial Sequence
  RPE65 RNA guide
cuuaaacaaauccauuaagc

SEQ ID NO: 47125 - RNA, 20 nt, Artificial Sequence
  RPE65 RNA guide
cuuagugauuuggcuagucu

SEQ ID NO: 47126 - RNA, 20 nt, Artificial Sequence
  RPE65 RNA guide
cuuccuacugcuuuuccaau

SEQ ID NO: 47127 - RNA, 20 nt, Artificial Sequence
  RPE65 RNA guide
cuuccugucaccauucuguu

SEQ ID NO: 47128 - RNA, 20 nt, Artificial Sequence
  RPE65 RNA guide
cuucgcagagaagauggggc

SEQ ID NO: 47129 - RNA, 20 nt, Artificial Sequence
  RPE65 RNA guide
cuucucugcgaagggagaaa

SEQ ID NO: 47130 - RNA, 20 nt, Artificial Sequence
  RPE65 RNA guide
cuucuuagugauuuggcuag

SEQ ID NO: 47131 - RNA, 20 nt, Artificial Sequence
  RPE65 RNA guide
cuugagauacuuucuguucu

SEQ ID NO: 47132 - RNA, 20 nt, Artificial Sequence
  RPE65 RNA guide
cuugagccccaucuucucug

SEQ ID NO: 47133 - RNA, 20 nt, Artificial Sequence
  RPE65 RNA guide
cuugccuuuuuaagcacaag

SEQ ID NO: 47134 - RNA, 20 nt, Artificial Sequence
  RPE65 RNA guide
cuugcuguuuuagaugugau

SEQ ID NO: 47135 - RNA, 20 nt, Artificial Sequence
  RPE65 RNA guide
cuugugcuuaaaaaggcaag

SEQ ID NO: 47136 - RNA, 20 nt, Artificial Sequence
  RPE65 RNA guide
cuuuaaguucaccucucagg

SEQ ID NO: 47137 - RNA, 20 nt, Artificial Sequence
  RPE65 RNA guide
cuuuauuccacaacccagaa

SEQ ID NO: 47138 - RNA, 20 nt, Artificial Sequence
  RPE65 RNA guide
cuuuauuuucauccugugug

SEQ ID NO: 47139 - RNA, 20 nt, Artificial Sequence
  RPE65 RNA guide
cuuucuguucugucuuccug

SEQ ID NO: 47140 - RNA, 20 nt, Artificial Sequence
  RPE65 RNA guide
cuuuuguuuucagguggggu

SEQ ID NO: 47141 - RNA, 20 nt, Artificial Sequence
  RPE65 RNA guide
cuuuuuaagcacaagugccu

SEQ ID NO: 47142 - RNA, 20 nt, Artificial Sequence
  RPE65 RNA guide
cuuuuucucccuucgcagag

SEQ ID NO: 47143 - RNA, 20 nt, Artificial Sequence
  RPE65 RNA guide
gaaaaacgcaugucuuuuuc

SEQ ID NO: 47144 - RNA, 20 nt, Artificial Sequence
  RPE65 RNA guide
gaaaaagacaugcguuuuuc

SEQ ID NO: 47145 - RNA, 20 nt, Artificial Sequence
  RPE65 RNA guide
gaaaacaaaagauucuguga

SEQ ID NO: 47146 - RNA, 20 nt, Artificial Sequence
  RPE65 RNA guide
gaaaacuaaucggguccaug

SEQ ID NO: 47147 - RNA, 20 nt, Artificial Sequence
  RPE65 RNA guide
gaaaagcaguaggaaguuua

SEQ ID NO: 47148 - RNA, 20 nt, Artificial Sequence
  RPE65 RNA guide
gaaaauaaagcaaccugcuu

SEQ ID NO: 47149 - RNA, 20 nt, Artificial Sequence
  RPE65 RNA guide
gaaacugcuauugagccagg

SEQ ID NO: 47150 - RNA, 20 nt, Artificial Sequence
  RPE65 RNA guide
gaaacuugagccccaucuuc

SEQ ID NO: 47151 - RNA, 20 nt, Artificial Sequence
  RPE65 RNA guide
gaaaggacacuggacaaaug

SEQ ID NO: 47152 - RNA, 20 nt, Artificial Sequence
  RPE65 RNA guide
gaaaguaucucaaggcugcu

SEQ ID NO: 47153 - RNA, 20 nt, Artificial Sequence
  RPE65 RNA guide
gaaauggcucugauacaccu

SEQ ID NO: 47154 - RNA, 20 nt, Artificial Sequence
  RPE65 RNA guide
gaaauuacgggguuuuuaca

SEQ ID NO: 47155 - RNA, 20 nt, Artificial Sequence
  RPE65 RNA guide
gaacaaugggagguguccca

SEQ ID NO: 47156 - RNA, 20 nt, Artificial Sequence
  RPE65 RNA guide
gaacagaaaguaucucaagg

SEQ ID NO: 47157 - RNA, 20 nt, Artificial Sequence
  RPE65 RNA guide
gaacaggcaggcacuugugc

SEQ ID NO: 47158 - RNA, 20 nt, Artificial Sequence
  RPE65 RNA guide
gaaccccaccugaaaacaaa

SEQ ID NO: 47159 - RNA, 20 nt, Artificial Sequence
  RPE65 RNA guide
gaacuuaaaguugacaaaau

SEQ ID NO: 47160 - RNA, 20 nt, Artificial Sequence
  RPE65 RNA guide
gaagacagaacagaaaguau

SEQ ID NO: 47161 - RNA, 20 nt, Artificial Sequence
  RPE65 RNA guide
gaagauggggcucaaguuuc

SEQ ID NO: 47162 - RNA, 20 nt, Artificial Sequence
  RPE65 RNA guide
gaagggagaaaaagacaugc

SEQ ID NO: 47163 - RNA, 20 nt, Artificial Sequence
  RPE65 RNA guide
gaaguuuagguaaucugaac

SEQ ID NO: 47164 - RNA, 20 nt, Artificial Sequence
  RPE65 RNA guide
gaauaaagaacaggcaggca

SEQ ID NO: 47165 - RNA, 20 nt, Artificial Sequence
  RPE65 RNA guide
gaaucacaucuaaaacagca

SEQ ID NO: 47166 - RNA, 20 nt, Artificial Sequence
  RPE65 RNA guide
gaaucuuuuguuuucaggug

SEQ ID NO: 47167 - RNA, 20 nt, Artificial Sequence
  RPE65 RNA guide
gaauggugacaggaagacag

SEQ ID NO: 47168 - RNA, 20 nt, Artificial Sequence
  RPE65 RNA guide
gacaaaugggacaccuccca

SEQ ID NO: 47169 - RNA, 20 nt, Artificial Sequence
  RPE65 RNA guide
gacacaaacagaauggugac

SEQ ID NO: 47170 - RNA, 20 nt, Artificial Sequence
  RPE65 RNA guide
gacaccucccauuguuccug

SEQ ID NO: 47171 - RNA, 20 nt, Artificial Sequence
  RPE65 RNA guide
gacacuggacaaaugggaca

SEQ ID NO: 47172 - RNA, 20 nt, Artificial Sequence
  RPE65 RNA guide
gacagaacagaaaguaucuc

SEQ ID NO: 47173 - RNA, 20 nt, Artificial Sequence
  RPE65 RNA guide
gacaggaagacagaacagaa

SEQ ID NO: 47174 - RNA, 20 nt, Artificial Sequence
  RPE65 RNA guide
gacaugcguuuuucagacua

SEQ ID NO: 47175 - RNA, 20 nt, Artificial Sequence
  RPE65 RNA guide
gacccgauuaguuuucaauc

SEQ ID NO: 47176 - RNA, 20 nt, Artificial Sequence
  RPE65 RNA guide
gaccugagaggugaacuuaa

SEQ ID NO: 47177 - RNA, 20 nt, Artificial Sequence
  RPE65 RNA guide
gacuagccaaaucacuaaga

SEQ ID NO: 47178 - RNA, 20 nt, Artificial Sequence
  RPE65 RNA guide
gagaaaaagacaugcguuuu

SEQ ID NO: 47179 - RNA, 20 nt, Artificial Sequence
  RPE65 RNA guide
gagaagauggggcucaaguu

SEQ ID NO: 47180 - RNA, 20 nt, Artificial Sequence
  RPE65 RNA guide
gagagaugauucuugccuuu

SEQ ID NO: 47181 - RNA, 20 nt, Artificial Sequence
  RPE65 RNA guide
gagaggugaacuuaaaguug

SEQ ID NO: 47182 - RNA, 20 nt, Artificial Sequence
  RPE65 RNA guide
gagauacuuucuguucuguc

SEQ ID NO: 47183 - RNA, 20 nt, Artificial Sequence
  RPE65 RNA guide
gagaugauucuugccuuuuu

SEQ ID NO: 47184 - RNA, 20 nt, Artificial Sequence
  RPE65 RNA guide
gagcacaggcaaugacaaau

SEQ ID NO: 47185 - RNA, 20 nt, Artificial Sequence
  RPE65 RNA guide
gagccagguguaucagagcc

SEQ ID NO: 47186 - RNA, 20 nt, Artificial Sequence
  RPE65 RNA guide
gagccauuuccucccgccca

SEQ ID NO: 47187 - RNA, 20 nt, Artificial Sequence
  RPE65 RNA guide
gagccccaucuucucugcga

SEQ ID NO: 47188 - RNA, 20 nt, Artificial Sequence
  RPE65 RNA guide
gagcugcugcacucaaucug

SEQ ID NO: 47189 - RNA, 20 nt, Artificial Sequence
  RPE65 RNA guide
gaggaaauggcucugauaca

SEQ ID NO: 47190 - RNA, 20 nt, Artificial Sequence
  RPE65 RNA guide
gaggugaacuuaaaguugac

SEQ ID NO: 47191 - RNA, 20 nt, Artificial Sequence
  RPE65 RNA guide
gaggugucccauuuguccag

SEQ ID NO: 47192 - RNA, 20 nt, Artificial Sequence
  RPE65 RNA guide
gagugcagcagcucuguaaa

SEQ ID NO: 47193 - RNA, 20 nt, Artificial Sequence
  RPE65 RNA guide
gauacaccuggcucaauagc

SEQ ID NO: 47194 - RNA, 20 nt, Artificial Sequence
  RPE65 RNA guide
gauacuuucuguucugucuu

SEQ ID NO: 47195 - RNA, 20 nt, Artificial Sequence
  RPE65 RNA guide
gaugaaaauaaagcaaccug

SEQ ID NO: 47196 - RNA, 20 nt, Artificial Sequence
  RPE65 RNA guide
gaugauucuugccuuuuuaa

SEQ ID NO: 47197 - RNA, 20 nt, Artificial Sequence
  RPE65 RNA guide
gaugugauucagauugagug

SEQ ID NO: 47198 - RNA, 20 nt, Artificial Sequence
  RPE65 RNA guide
gauguucagauuaccuaaac

SEQ ID NO: 47199 - RNA, 20 nt, Artificial Sequence
  RPE65 RNA guide
gauuaccuaaacuuccuacu

SEQ ID NO: 47200 - RNA, 20 nt, Artificial Sequence
  RPE65 RNA guide
gauucagauugagugcagca

SEQ ID NO: 47201 - RNA, 20 nt, Artificial Sequence
  RPE65 RNA guide
gauucugugaccugagaggu

SEQ ID NO: 47202 - RNA, 20 nt, Artificial Sequence
  RPE65 RNA guide
gauucuugccuuuuuaagca

SEQ ID NO: 47203 - RNA, 20 nt, Artificial Sequence
  RPE65 RNA guide
gauugaaaacuaaucggguc

SEQ ID NO: 47204 - RNA, 20 nt, Artificial Sequence
  RPE65 RNA guide
gauugagugcagcagcucug

SEQ ID NO: 47205 - RNA, 20 nt, Artificial Sequence
  RPE65 RNA guide
gauuuggcuagucugaaaaa

SEQ ID NO: 47206 - RNA, 20 nt, Artificial Sequence
  RPE65 RNA guide
gauuuguuuaaguaacagca

SEQ ID NO: 47207 - RNA, 20 nt, Artificial Sequence
  RPE65 RNA guide
gauuuugucaacuuuaaguu

SEQ ID NO: 47208 - RNA, 20 nt, Artificial Sequence
  RPE65 RNA guide
gcaaccugcuuaauggauuu

SEQ ID NO: 47209 - RNA, 20 nt, Artificial Sequence
  RPE65 RNA guide
gcacaagugccugccuguuc

SEQ ID NO: 47210 - RNA, 20 nt, Artificial Sequence
  RPE65 RNA guide
gcacaggcaaugacaaauaa

SEQ ID NO: 47211 - RNA, 20 nt, Artificial Sequence
  RPE65 RNA guide
gcacucaaucugaaucacau

SEQ ID NO: 47212 - RNA, 20 nt, Artificial Sequence
  RPE65 RNA guide
gcacuugugcuuaaaaaggc

SEQ ID NO: 47213 - RNA, 20 nt, Artificial Sequence
  RPE65 RNA guide
gcagagaagauggggcucaa

SEQ ID NO: 47214 - RNA, 20 nt, Artificial Sequence
  RPE65 RNA guide
gcagcagcucuguaaaaacc

SEQ ID NO: 47215 - RNA, 20 nt, Artificial Sequence
  RPE65 RNA guide
gcagccuugagauacuuucu

SEQ ID NO: 47216 - RNA, 20 nt, Artificial Sequence
  RPE65 RNA guide
gcagcucuguaaaaaccccg

SEQ ID NO: 47217 - RNA, 20 nt, Artificial Sequence
  RPE65 RNA guide
gcaggcacuugugcuuaaaa

SEQ ID NO: 47218 - RNA, 20 nt, Artificial Sequence
  RPE65 RNA guide
gcagguugcuuuauuuucau

SEQ ID NO: 47219 - RNA, 20 nt, Artificial Sequence
  RPE65 RNA guide
gcaguaggaaguuuagguaa

SEQ ID NO: 47220 - RNA, 20 nt, Artificial Sequence
  RPE65 RNA guide
gcaguuucuggguuguggaa

SEQ ID NO: 47221 - RNA, 20 nt, Artificial Sequence
  RPE65 RNA guide
gcaugucuuuuucucccuuc

SEQ ID NO: 47222 - RNA, 20 nt, Artificial Sequence
  RPE65 RNA guide
gccaaaucacuaagaagaca

SEQ ID NO: 47223 - RNA, 20 nt, Artificial Sequence
  RPE65 RNA guide
gccagguguaucagagccau

SEQ ID NO: 47224 - RNA, 20 nt, Artificial Sequence
  RPE65 RNA guide
gccauuuccucccgcccaca

SEQ ID NO: 47225 - RNA, 20 nt, Artificial Sequence
  RPE65 RNA guide
gcccacacaggaugaaaaua

SEQ ID NO: 47226 - RNA, 20 nt, Artificial Sequence
  RPE65 RNA guide
gccccaucuucucugcgaag

SEQ ID NO: 47227 - RNA, 20 nt, Artificial Sequence
  RPE65 RNA guide
gccugccuguucuuuauucc

SEQ ID NO: 47228 - RNA, 20 nt, Artificial Sequence
  RPE65 RNA guide
gccugugcucauguuugacu

SEQ ID NO: 47229 - RNA, 20 nt, Artificial Sequence
  RPE65 RNA guide
gccuguucuuuauuccacaa

SEQ ID NO: 47230 - RNA, 20 nt, Artificial Sequence
  RPE65 RNA guide
gccuugagauacuuucuguu

SEQ ID NO: 47231 - RNA, 20 nt, Artificial Sequence
  RPE65 RNA guide
gccuuuuuaagcacaagugc

SEQ ID NO: 47232 - RNA, 20 nt, Artificial Sequence
  RPE65 RNA guide
gcgaagggagaaaaagacau

SEQ ID NO: 47233 - RNA, 20 nt, Artificial Sequence
  RPE65 RNA guide
gcgggaggaaauggcucuga

SEQ ID NO: 47234 - RNA, 20 nt, Artificial Sequence
  RPE65 RNA guide
gcguuuuucagacuagccaa

SEQ ID NO: 47235 - RNA, 20 nt, Artificial Sequence
  RPE65 RNA guide
gcuagucugaaaaacgcaug

SEQ ID NO: 47236 - RNA, 20 nt, Artificial Sequence
  RPE65 RNA guide
gcuauugagccagguguauc

SEQ ID NO: 47237 - RNA, 20 nt, Artificial Sequence
  RPE65 RNA guide
gcucaauagcaguuucuggg

SEQ ID NO: 47238 - RNA, 20 nt, Artificial Sequence
  RPE65 RNA guide
gcucugauacaccuggcuca

SEQ ID NO: 47239 - RNA, 20 nt, Artificial Sequence
  RPE65 RNA guide
gcucuguaaaaaccccguaa

SEQ ID NO: 47240 - RNA, 20 nt, Artificial Sequence
  RPE65 RNA guide
gcugcacucaaucugaauca

SEQ ID NO: 47241 - RNA, 20 nt, Artificial Sequence
  RPE65 RNA guide
gcugcugcacucaaucugaa

SEQ ID NO: 47242 - RNA, 20 nt, Artificial Sequence
  RPE65 RNA guide
gcugcuguuacuuaaacaaa

SEQ ID NO: 47243 - RNA, 20 nt, Artificial Sequence
  RPE65 RNA guide
gcuguugucuucuuagugau

SEQ ID NO: 47244 - RNA, 20 nt, Artificial Sequence
  RPE65 RNA guide
gcuguuuuagaugugauuca

SEQ ID NO: 47245 - RNA, 20 nt, Artificial Sequence
  RPE65 RNA guide
gcuuaaaaaggcaagaauca

SEQ ID NO: 47246 - RNA, 20 nt, Artificial Sequence
  RPE65 RNA guide
gcuuuauuuucauccugugu

SEQ ID NO: 47247 - RNA, 20 nt, Artificial Sequence
  RPE65 RNA guide
ggaaaagcaguaggaaguuu

SEQ ID NO: 47248 - RNA, 20 nt, Artificial Sequence
  RPE65 RNA guide
ggaaacuugagccccaucuu

SEQ ID NO: 47249 - RNA, 20 nt, Artificial Sequence
  RPE65 RNA guide
ggaaauggcucugauacacc

SEQ ID NO: 47250 - RNA, 20 nt, Artificial Sequence
  RPE65 RNA guide
ggaaauuacgggguuuuuac

SEQ ID NO: 47251 - RNA, 20 nt, Artificial Sequence
  RPE65 RNA guide
ggaacaaugggagguguccc

SEQ ID NO: 47252 - RNA, 20 nt, Artificial Sequence
  RPE65 RNA guide
ggaagacagaacagaaagua

SEQ ID NO: 47253 - RNA, 20 nt, Artificial Sequence
  RPE65 RNA guide
ggaaguuuagguaaucugaa

SEQ ID NO: 47254 - RNA, 20 nt, Artificial Sequence
  RPE65 RNA guide
ggaauaaagaacaggcaggc

SEQ ID NO: 47255 - RNA, 20 nt, Artificial Sequence
  RPE65 RNA guide
ggacaaaugggacaccuccc

SEQ ID NO: 47256 - RNA, 20 nt, Artificial Sequence
  RPE65 RNA guide
ggacacaaacagaaugguga

SEQ ID NO: 47257 - RNA, 20 nt, Artificial Sequence
  RPE65 RNA guide
ggacaccucccauuguuccu

SEQ ID NO: 47258 - RNA, 20 nt, Artificial Sequence
  RPE65 RNA guide
ggacacuggacaaaugggac

SEQ ID NO: 47259 - RNA, 20 nt, Artificial Sequence
  RPE65 RNA guide
ggacccgauuaguuuucaau

SEQ ID NO: 47260 - RNA, 20 nt, Artificial Sequence
  RPE65 RNA guide
ggagaaaaagacaugcguuu

SEQ ID NO: 47261 - RNA, 20 nt, Artificial Sequence
  RPE65 RNA guide
ggaggaaauggcucugauac

SEQ ID NO: 47262 - RNA, 20 nt, Artificial Sequence
  RPE65 RNA guide
ggaggugucccauuugucca

SEQ ID NO: 47263 - RNA, 20 nt, Artificial Sequence
  RPE65 RNA guide
ggaugaaaauaaagcaaccu

SEQ ID NO: 47264 - RNA, 20 nt, Artificial Sequence
  RPE65 RNA guide
ggauuuguuuaaguaacagc

SEQ ID NO: 47265 - RNA, 20 nt, Artificial Sequence
  RPE65 RNA guide
ggauuuugucaacuuuaagu

SEQ ID NO: 47266 - RNA, 20 nt, Artificial Sequence
  RPE65 RNA guide
ggcaagaaucaucucucuaa

SEQ ID NO: 47267 - RNA, 20 nt, Artificial Sequence
  RPE65 RNA guide
ggcacuugugcuuaaaaagg

SEQ ID NO: 47268 - RNA, 20 nt, Artificial Sequence
  RPE65 RNA guide
ggcaggcacuugugcuuaaa

SEQ ID NO: 47269 - RNA, 20 nt, Artificial Sequence
  RPE65 RNA guide
ggcgggaggaaauggcucug

SEQ ID NO: 47270 - RNA, 20 nt, Artificial Sequence
  RPE65 RNA guide
ggcuagucugaaaaacgcau

SEQ ID NO: 47271 - RNA, 20 nt, Artificial Sequence
  RPE65 RNA guide
ggcucaauagcaguuucugg

SEQ ID NO: 47272 - RNA, 20 nt, Artificial Sequence
  RPE65 RNA guide
ggcucugauacaccuggcuc

SEQ ID NO: 47273 - RNA, 20 nt, Artificial Sequence
  RPE65 RNA guide
ggcugcuguuacuuaaacaa

SEQ ID NO: 47274 - RNA, 20 nt, Artificial Sequence
  RPE65 RNA guide
gggaaacuugagccccaucu

SEQ ID NO: 47275 - RNA, 20 nt, Artificial Sequence
  RPE65 RNA guide
gggacaccucccauuguucc

SEQ ID NO: 47276 - RNA, 20 nt, Artificial Sequence
  RPE65 RNA guide
gggagaaaaagacaugcguu

SEQ ID NO: 47277 - RNA, 20 nt, Artificial Sequence
  RPE65 RNA guide
gggaggaaauggcucugaua

SEQ ID NO: 47278 - RNA, 20 nt, Artificial Sequence
  RPE65 RNA guide
gggaggugucccauuugucc

SEQ ID NO: 47279 - RNA, 20 nt, Artificial Sequence
  RPE65 RNA guide
gggcgggaggaaauggcucu

SEQ ID NO: 47280 - RNA, 20 nt, Artificial Sequence
  RPE65 RNA guide
ggggaaacuugagccccauc

SEQ ID NO: 47281 - RNA, 20 nt, Artificial Sequence
  RPE65 RNA guide
gggguucauggacccgauua

SEQ ID NO: 47282 - RNA, 20 nt, Artificial Sequence
  RPE65 RNA guide
gggguuuuuacagagcugcu

SEQ ID NO: 47283 - RNA, 20 nt, Artificial Sequence
  RPE65 RNA guide
ggguccaugaaccccaccug

SEQ ID NO: 47284 - RNA, 20 nt, Artificial Sequence
  RPE65 RNA guide
ggguucauggacccgauuag

SEQ ID NO: 47285 - RNA, 20 nt, Artificial Sequence
  RPE65 RNA guide
ggguuguggaauaaagaaca

SEQ ID NO: 47286 - RNA, 20 nt, Artificial Sequence
  RPE65 RNA guide
ggguuuuuacagagcugcug

SEQ ID NO: 47287 - RNA, 20 nt, Artificial Sequence
  RPE65 RNA guide
gguaaucugaacaucaaaac

SEQ ID NO: 47288 - RNA, 20 nt, Artificial Sequence
  RPE65 RNA guide
ggucacagaaucuuuuguuu

SEQ ID NO: 47289 - RNA, 20 nt, Artificial Sequence
  RPE65 RNA guide
gguccaugaaccccaccuga

SEQ ID NO: 47290 - RNA, 20 nt, Artificial Sequence
  RPE65 RNA guide
ggugaacuuaaaguugacaa

SEQ ID NO: 47291 - RNA, 20 nt, Artificial Sequence
  RPE65 RNA guide
ggugacaggaagacagaaca

SEQ ID NO: 47292 - RNA, 20 nt, Artificial Sequence
  RPE65 RNA guide
ggugggguucauggacccga

SEQ ID NO: 47293 - RNA, 20 nt, Artificial Sequence
  RPE65 RNA guide
gguguaucagagccauuucc

SEQ ID NO: 47294 - RNA, 20 nt, Artificial Sequence
  RPE65 RNA guide
ggugucccauuuguccagug

SEQ ID NO: 47295 - RNA, 20 nt, Artificial Sequence
  RPE65 RNA guide
gguucauggacccgauuagu

SEQ ID NO: 47296 - RNA, 20 nt, Artificial Sequence
  RPE65 RNA guide
gguugcuuuauuuucauccu

SEQ ID NO: 47297 - RNA, 20 nt, Artificial Sequence
  RPE65 RNA guide
gguuguggaauaaagaacag

SEQ ID NO: 47298 - RNA, 20 nt, Artificial Sequence
  RPE65 RNA guide
gguuuuuacagagcugcugc

SEQ ID NO: 47299 - RNA, 20 nt, Artificial Sequence
  RPE65 RNA guide
guaaaaaccccguaauuucc

SEQ ID NO: 47300 - RNA, 20 nt, Artificial Sequence
  RPE65 RNA guide
guaacagcagccuugagaua

SEQ ID NO: 47301 - RNA, 20 nt, Artificial Sequence
  RPE65 RNA guide
guaagaaaggacacuggaca

SEQ ID NO: 47302 - RNA, 20 nt, Artificial Sequence
  RPE65 RNA guide
guaauuggaaaagcaguagg

SEQ ID NO: 47303 - RNA, 20 nt, Artificial Sequence
  RPE65 RNA guide
guaauuuccaggaacaaugg

SEQ ID NO: 47304 - RNA, 20 nt, Artificial Sequence
  RPE65 RNA guide
guaggaaguuuagguaaucu

SEQ ID NO: 47305 - RNA, 20 nt, Artificial Sequence
  RPE65 RNA guide
guaucagagccauuuccucc

SEQ ID NO: 47306 - RNA, 20 nt, Artificial Sequence
  RPE65 RNA guide
guaucucaaggcugcuguua

SEQ ID NO: 47307 - RNA, 20 nt, Artificial Sequence
  RPE65 RNA guide
gucaaacaugagcacaggca

SEQ ID NO: 47308 - RNA, 20 nt, Artificial Sequence
  RPE65 RNA guide
gucaacuuuaaguucaccuc

SEQ ID NO: 47309 - RNA, 20 nt, Artificial Sequence
  RPE65 RNA guide
gucacagaaucuuuuguuuu

SEQ ID NO: 47310 - RNA, 20 nt, Artificial Sequence
  RPE65 RNA guide
gucaccauucuguuuguguc

SEQ ID NO: 47311 - RNA, 20 nt, Artificial Sequence
  RPE65 RNA guide
gucauugccugugcucaugu

SEQ ID NO: 47312 - RNA, 20 nt, Artificial Sequence
  RPE65 RNA guide
guccaugaaccccaccugaa

SEQ ID NO: 47313 - RNA, 20 nt, Artificial Sequence
  RPE65 RNA guide
gucccauuuguccagugucc

SEQ ID NO: 47314 - RNA, 20 nt, Artificial Sequence
  RPE65 RNA guide
gucugaaaaacgcaugucuu

SEQ ID NO: 47315 - RNA, 20 nt, Artificial Sequence
  RPE65 RNA guide
gucuuccugucaccauucug

SEQ ID NO: 47316 - RNA, 20 nt, Artificial Sequence
  RPE65 RNA guide
gucuucuuagugauuuggcu

SEQ ID NO: 47317 - RNA, 20 nt, Artificial Sequence
  RPE65 RNA guide
gucuuuuucucccuucgcag

SEQ ID NO: 47318 - RNA, 20 nt, Artificial Sequence
  RPE65 RNA guide
gugacaggaagacagaacag

SEQ ID NO: 47319 - RNA, 20 nt, Artificial Sequence
  RPE65 RNA guide
gugaccugagaggugaacuu

SEQ ID NO: 47320 - RNA, 20 nt, Artificial Sequence
  RPE65 RNA guide
gugagagucaaaaauguaau

SEQ ID NO: 47321 - RNA, 20 nt, Artificial Sequence
  RPE65 RNA guide
gugauucagauugagugcag

SEQ ID NO: 47322 - RNA, 20 nt, Artificial Sequence
  RPE65 RNA guide
gugauuuggcuagucugaaa

SEQ ID NO: 47323 - RNA, 20 nt, Artificial Sequence
  RPE65 RNA guide
gugcagcagcucuguaaaaa

SEQ ID NO: 47324 - RNA, 20 nt, Artificial Sequence
  RPE65 RNA guide
gugccugccuguucuuuauu

SEQ ID NO: 47325 - RNA, 20 nt, Artificial Sequence
  RPE65 RNA guide
gugcuuaaaaaggcaagaau

SEQ ID NO: 47326 - RNA, 20 nt, Artificial Sequence
  RPE65 RNA guide
guggaauaaagaacaggcag

SEQ ID NO: 47327 - RNA, 20 nt, Artificial Sequence
  RPE65 RNA guide
gugggcgggaggaaauggcu

SEQ ID NO: 47328 - RNA, 20 nt, Artificial Sequence
  RPE65 RNA guide
gugggguucauggacccgau

SEQ ID NO: 47329 - RNA, 20 nt, Artificial Sequence
  RPE65 RNA guide
guguaucagagccauuuccu

SEQ ID NO: 47330 - RNA, 20 nt, Artificial Sequence
  RPE65 RNA guide
gugucccauuuguccagugu

SEQ ID NO: 47331 - RNA, 20 nt, Artificial Sequence
  RPE65 RNA guide
gugugggcgggaggaaaugg

SEQ ID NO: 47332 - RNA, 20 nt, Artificial Sequence
  RPE65 RNA guide
guucaccucucaggucacag

SEQ ID NO: 47333 - RNA, 20 nt, Artificial Sequence
  RPE65 RNA guide
guucagauuaccuaaacuuc

SEQ ID NO: 47334 - RNA, 20 nt, Artificial Sequence
  RPE65 RNA guide
guucauggacccgauuaguu

SEQ ID NO: 47335 - RNA, 20 nt, Artificial Sequence
  RPE65 RNA guide
guuccuggaaauuacggggu

SEQ ID NO: 47336 - RNA, 20 nt, Artificial Sequence
  RPE65 RNA guide
guucugucuuccugucacca

SEQ ID NO: 47337 - RNA, 20 nt, Artificial Sequence
  RPE65 RNA guide
guucuuuauuccacaaccca

SEQ ID NO: 47338 - RNA, 20 nt, Artificial Sequence
  RPE65 RNA guide
guugcuuuauuuucauccug

SEQ ID NO: 47339 - RNA, 20 nt, Artificial Sequence
  RPE65 RNA guide
guugucuucuuagugauuug

SEQ ID NO: 47340 - RNA, 20 nt, Artificial Sequence
  RPE65 RNA guide
guuguggaauaaagaacagg

SEQ ID NO: 47341 - RNA, 20 nt, Artificial Sequence
  RPE65 RNA guide
guuuaaguaacagcagccuu

SEQ ID NO: 47342 - RNA, 20 nt, Artificial Sequence
  RPE65 RNA guide
guuucuggguuguggaauaa

SEQ ID NO: 47343 - RNA, 20 nt, Artificial Sequence
  RPE65 RNA guide
guuuuagaugugauucagau

SEQ ID NO: 47344 - RNA, 20 nt, Artificial Sequence
  RPE65 RNA guide
guuuucaggugggguucaug

SEQ ID NO: 47345 - RNA, 20 nt, Artificial Sequence
  RPE65 RNA guide
guuuuuacagagcugcugca

SEQ ID NO: 47346 - RNA, 20 nt, Artificial Sequence
  RPE65 RNA guide
guuuuucagacuagccaaau

SEQ ID NO: 47347 - RNA, 20 nt, Artificial Sequence
  RPE65 RNA guide
uaaaaaccccguaauuucca

SEQ ID NO: 47348 - RNA, 20 nt, Artificial Sequence
  RPE65 RNA guide
uaaaaaggcaagaaucaucu

SEQ ID NO: 47349 - RNA, 20 nt, Artificial Sequence
  RPE65 RNA guide
uaaaaagucaaacaugagca

SEQ ID NO: 47350 - RNA, 20 nt, Artificial Sequence
  RPE65 RNA guide
uaaacaaauccauuaagcag

SEQ ID NO: 47351 - RNA, 20 nt, Artificial Sequence
  RPE65 RNA guide
uaaacuuccuacugcuuuuc

SEQ ID NO: 47352 - RNA, 20 nt, Artificial Sequence
  RPE65 RNA guide
uaaagaacaggcaggcacuu

SEQ ID NO: 47353 - RNA, 20 nt, Artificial Sequence
  RPE65 RNA guide
uaaagcaaccugcuuaaugg

SEQ ID NO: 47354 - RNA, 20 nt, Artificial Sequence
  RPE65 RNA guide
uaacagcagccuugagauac

SEQ ID NO: 47355 - RNA, 20 nt, Artificial Sequence
  RPE65 RNA guide
uaacucuugcuguuuuagau

SEQ ID NO: 47356 - RNA, 20 nt, Artificial Sequence
  RPE65 RNA guide
uaagaaaggacacuggacaa

SEQ ID NO: 47357 - RNA, 20 nt, Artificial Sequence
  RPE65 RNA guide
uaagcacaagugccugccug

SEQ ID NO: 47358 - RNA, 20 nt, Artificial Sequence
  RPE65 RNA guide
uaagcagguugcuuuauuuu

SEQ ID NO: 47359 - RNA, 20 nt, Artificial Sequence
  RPE65 RNA guide
uaaggacacaaacagaaugg

SEQ ID NO: 47360 - RNA, 20 nt, Artificial Sequence
  RPE65 RNA guide
uaaguaacagcagccuugag

SEQ ID NO: 47361 - RNA, 20 nt, Artificial Sequence
  RPE65 RNA guide
uaaguucaccucucagguca

SEQ ID NO: 47362 - RNA, 20 nt, Artificial Sequence
  RPE65 RNA guide
uaaucggguccaugaacccc

SEQ ID NO: 47363 - RNA, 20 nt, Artificial Sequence
  RPE65 RNA guide
uaaugauugaaaacuaaucg

SEQ ID NO: 47364 - RNA, 20 nt, Artificial Sequence
  RPE65 RNA guide
uaauuggaaaagcaguagga

SEQ ID NO: 47365 - RNA, 20 nt, Artificial Sequence
  RPE65 RNA guide
uaauuuccaggaacaauggg

SEQ ID NO: 47366 - RNA, 20 nt, Artificial Sequence
  RPE65 RNA guide
uacaccuggcucaauagcag

SEQ ID NO: 47367 - RNA, 20 nt, Artificial Sequence
  RPE65 RNA guide
uacagagcugcugcacucaa

SEQ ID NO: 47368 - RNA, 20 nt, Artificial Sequence
  RPE65 RNA guide
uaccuaaacuuccuacugcu

SEQ ID NO: 47369 - RNA, 20 nt, Artificial Sequence
  RPE65 RNA guide
uacgggguuuuuacagagcu

SEQ ID NO: 47370 - RNA, 20 nt, Artificial Sequence
  RPE65 RNA guide
uacuuucuguucugucuucc

SEQ ID NO: 47371 - RNA, 20 nt, Artificial Sequence
  RPE65 RNA guide
uagagagaugauucuugccu

SEQ ID NO: 47372 - RNA, 20 nt, Artificial Sequence
  RPE65 RNA guide
uagaugugauucagauugag

SEQ ID NO: 47373 - RNA, 20 nt, Artificial Sequence
  RPE65 RNA guide
uagcaguuucuggguugugg

SEQ ID NO: 47374 - RNA, 20 nt, Artificial Sequence
  RPE65 RNA guide
uagccaaaucacuaagaaga

SEQ ID NO: 47375 - RNA, 20 nt, Artificial Sequence
  RPE65 RNA guide
uaggaaguuuagguaaucug

SEQ ID NO: 47376 - RNA, 20 nt, Artificial Sequence
  RPE65 RNA guide
uagucugaaaaacgcauguc

SEQ ID NO: 47377 - RNA, 20 nt, Artificial Sequence
  RPE65 RNA guide
uagugauuuggcuagucuga

SEQ ID NO: 47378 - RNA, 20 nt, Artificial Sequence
  RPE65 RNA guide
uaucagagccauuuccuccc

SEQ ID NO: 47379 - RNA, 20 nt, Artificial Sequence
  RPE65 RNA guide
uaucucaaggcugcuguuac

SEQ ID NO: 47380 - RNA, 20 nt, Artificial Sequence
  RPE65 RNA guide
uauuccacaacccagaaacu

SEQ ID NO: 47381 - RNA, 20 nt, Artificial Sequence
  RPE65 RNA guide
uauugagccagguguaucag

SEQ ID NO: 47382 - RNA, 20 nt, Artificial Sequence
  RPE65 RNA guide
uauuugucauugccugugcu

SEQ ID NO: 47383 - RNA, 20 nt, Artificial Sequence
  RPE65 RNA guide
uauuuucauccugugugggc

SEQ ID NO: 47384 - RNA, 20 nt, Artificial Sequence
  RPE65 RNA guide
ucaaacaugagcacaggcaa

SEQ ID NO: 47385 - RNA, 20 nt, Artificial Sequence
  RPE65 RNA guide
ucaacuuuaaguucaccucu

SEQ ID NO: 47386 - RNA, 20 nt, Artificial Sequence
  RPE65 RNA guide
ucaaggcugcuguuacuuaa

SEQ ID NO: 47387 - RNA, 20 nt, Artificial Sequence
  RPE65 RNA guide
ucaauagcaguuucuggguu

SEQ ID NO: 47388 - RNA, 20 nt, Artificial Sequence
  RPE65 RNA guide
ucacagaaucuuuuguuuuc

SEQ ID NO: 47389 - RNA, 20 nt, Artificial Sequence
  RPE65 RNA guide
ucacaucuaaaacagcaaga

SEQ ID NO: 47390 - RNA, 20 nt, Artificial Sequence
  RPE65 RNA guide
ucaccauucuguuugugucc

SEQ ID NO: 47391 - RNA, 20 nt, Artificial Sequence
  RPE65 RNA guide
ucaccucucaggucacagaa

SEQ ID NO: 47392 - RNA, 20 nt, Artificial Sequence
  RPE65 RNA guide
ucagacuagccaaaucacua

SEQ ID NO: 47393 - RNA, 20 nt, Artificial Sequence
  RPE65 RNA guide
ucagagccauuuccucccgc

SEQ ID NO: 47394 - RNA, 20 nt, Artificial Sequence
  RPE65 RNA guide
ucagauuaccuaaacuuccu

SEQ ID NO: 47395 - RNA, 20 nt, Artificial Sequence
  RPE65 RNA guide
ucagauugagugcagcagcu

SEQ ID NO: 47396 - RNA, 20 nt, Artificial Sequence
  RPE65 RNA guide
ucaggucacagaaucuuuug

SEQ ID NO: 47397 - RNA, 20 nt, Artificial Sequence
  RPE65 RNA guide
ucaggugggguucauggacc

SEQ ID NO: 47398 - RNA, 20 nt, Artificial Sequence
  RPE65 RNA guide
ucauccugugugggcgggag

SEQ ID NO: 47399 - RNA, 20 nt, Artificial Sequence
  RPE65 RNA guide
ucauggacccgauuaguuuu

SEQ ID NO: 47400 - RNA, 20 nt, Artificial Sequence
  RPE65 RNA guide
ucauugccugugcucauguu

SEQ ID NO: 47401 - RNA, 20 nt, Artificial Sequence
  RPE65 RNA guide
uccaauuacauuuuugacuc

SEQ ID NO: 47402 - RNA, 20 nt, Artificial Sequence
  RPE65 RNA guide
uccacaacccagaaacugcu

SEQ ID NO: 47403 - RNA, 20 nt, Artificial Sequence
  RPE65 RNA guide
uccaggaacaaugggaggug

SEQ ID NO: 47404 - RNA, 20 nt, Artificial Sequence
  RPE65 RNA guide
uccaugaaccccaccugaaa

SEQ ID NO: 47405 - RNA, 20 nt, Artificial Sequence
  RPE65 RNA guide
uccauuaagcagguugcuuu

SEQ ID NO: 47406 - RNA, 20 nt, Artificial Sequence
  RPE65 RNA guide
ucccauuguuccuggaaauu

SEQ ID NO: 47407 - RNA, 20 nt, Artificial Sequence
  RPE65 RNA guide
ucccauuuguccaguguccu

SEQ ID NO: 47408 - RNA, 20 nt, Artificial Sequence
  RPE65 RNA guide
ucccgcccacacaggaugaa

SEQ ID NO: 47409 - RNA, 20 nt, Artificial Sequence
  RPE65 RNA guide
ucccuucgcagagaagaugg

SEQ ID NO: 47410 - RNA, 20 nt, Artificial Sequence
  RPE65 RNA guide
uccuacugcuuuuccaauua

SEQ ID NO: 47411 - RNA, 20 nt, Artificial Sequence
  RPE65 RNA guide
uccucccgcccacacaggau

SEQ ID NO: 47412 - RNA, 20 nt, Artificial Sequence
  RPE65 RNA guide
uccuggaaauuacgggguuu

SEQ ID NO: 47413 - RNA, 20 nt, Artificial Sequence
  RPE65 RNA guide
uccugucaccauucuguuug

SEQ ID NO: 47414 - RNA, 20 nt, Artificial Sequence
  RPE65 RNA guide
uccugugugggcgggaggaa

SEQ ID NO: 47415 - RNA, 20 nt, Artificial Sequence
  RPE65 RNA guide
ucgcagagaagauggggcuc

SEQ ID NO: 47416 - RNA, 20 nt, Artificial Sequence
  RPE65 RNA guide
ucggguccaugaaccccacc

SEQ ID NO: 47417 - RNA, 20 nt, Artificial Sequence
  RPE65 RNA guide
ucucaaggcugcuguuacuu

SEQ ID NO: 47418 - RNA, 20 nt, Artificial Sequence
  RPE65 RNA guide
ucucaggucacagaaucuuu

SEQ ID NO: 47419 - RNA, 20 nt, Artificial Sequence
  RPE65 RNA guide
ucucccuucgcagagaagau

SEQ ID NO: 47420 - RNA, 20 nt, Artificial Sequence
  RPE65 RNA guide
ucucugcgaagggagaaaaa

SEQ ID NO: 47421 - RNA, 20 nt, Artificial Sequence
  RPE65 RNA guide
ucugaaaaacgcaugucuuu

SEQ ID NO: 47422 - RNA, 20 nt, Artificial Sequence
  RPE65 RNA guide
ucugaaucacaucuaaaaca

SEQ ID NO: 47423 - RNA, 20 nt, Artificial Sequence
  RPE65 RNA guide
ucugauacaccuggcucaau

SEQ ID NO: 47424 - RNA, 20 nt, Artificial Sequence
  RPE65 RNA guide
ucugcgaagggagaaaaaga

SEQ ID NO: 47425 - RNA, 20 nt, Artificial Sequence
  RPE65 RNA guide
ucuggguuguggaauaaaga

SEQ ID NO: 47426 - RNA, 20 nt, Artificial Sequence
  RPE65 RNA guide
ucuguaaaaaccccguaauu

SEQ ID NO: 47427 - RNA, 20 nt, Artificial Sequence
  RPE65 RNA guide
ucugucuuccugucaccauu

SEQ ID NO: 47428 - RNA, 20 nt, Artificial Sequence
  RPE65 RNA guide
ucugugaccugagaggugaa

SEQ ID NO: 47429 - RNA, 20 nt, Artificial Sequence
  RPE65 RNA guide
ucuguucugucuuccuguca

SEQ ID NO: 47430 - RNA, 20 nt, Artificial Sequence
  RPE65 RNA guide
ucuuagugauuuggcuaguc

SEQ ID NO: 47431 - RNA, 20 nt, Artificial Sequence
  RPE65 RNA guide
ucuuccugucaccauucugu

SEQ ID NO: 47432 - RNA, 20 nt, Artificial Sequence
  RPE65 RNA guide
ucuucucugcgaagggagaa

SEQ ID NO: 47433 - RNA, 20 nt, Artificial Sequence
  RPE65 RNA guide
ucuucuuagugauuuggcua

SEQ ID NO: 47434 - RNA, 20 nt, Artificial Sequence
  RPE65 RNA guide
ucuugccuuuuuaagcacaa

SEQ ID NO: 47435 - RNA, 20 nt, Artificial Sequence
  RPE65 RNA guide
ucuugcuguuuuagauguga

SEQ ID NO: 47436 - RNA, 20 nt, Artificial Sequence
  RPE65 RNA guide
ucuuuauuccacaacccaga

SEQ ID NO: 47437 - RNA, 20 nt, Artificial Sequence
  RPE65 RNA guide
ucuuuuguuuucaggugggg

SEQ ID NO: 47438 - RNA, 20 nt, Artificial Sequence
  RPE65 RNA guide
ucuuuuucucccuucgcaga

SEQ ID NO: 47439 - RNA, 20 nt, Artificial Sequence
  RPE65 RNA guide
ugaaaaacgcaugucuuuuu

SEQ ID NO: 47440 - RNA, 20 nt, Artificial Sequence
  RPE65 RNA guide
ugaaaacaaaagauucugug

SEQ ID NO: 47441 - RNA, 20 nt, Artificial Sequence
  RPE65 RNA guide
ugaaaacuaaucggguccau

SEQ ID NO: 47442 - RNA, 20 nt, Artificial Sequence
  RPE65 RNA guide
ugaaccccaccugaaaacaa

SEQ ID NO: 47443 - RNA, 20 nt, Artificial Sequence
  RPE65 RNA guide
ugaacuuaaaguugacaaaa

SEQ ID NO: 47444 - RNA, 20 nt, Artificial Sequence
  RPE65 RNA guide
ugaaucacaucuaaaacagc

SEQ ID NO: 47445 - RNA, 20 nt, Artificial Sequence
  RPE65 RNA guide
ugacaggaagacagaacaga

SEQ ID NO: 47446 - RNA, 20 nt, Artificial Sequence
  RPE65 RNA guide
ugaccugagaggugaacuua

SEQ ID NO: 47447 - RNA, 20 nt, Artificial Sequence
  RPE65 RNA guide
ugagaggugaacuuaaaguu

SEQ ID NO: 47448 - RNA, 20 nt, Artificial Sequence
  RPE65 RNA guide
ugagauacuuucuguucugu

SEQ ID NO: 47449 - RNA, 20 nt, Artificial Sequence
  RPE65 RNA guide
ugagcacaggcaaugacaaa

SEQ ID NO: 47450 - RNA, 20 nt, Artificial Sequence
  RPE65 RNA guide
ugagccagguguaucagagc

SEQ ID NO: 47451 - RNA, 20 nt, Artificial Sequence
  RPE65 RNA guide
ugagccccaucuucucugcg

SEQ ID NO: 47452 - RNA, 20 nt, Artificial Sequence
  RPE65 RNA guide
ugagugcagcagcucuguaa

SEQ ID NO: 47453 - RNA, 20 nt, Artificial Sequence
  RPE65 RNA guide
ugauacaccuggcucaauag

SEQ ID NO: 47454 - RNA, 20 nt, Artificial Sequence
  RPE65 RNA guide
ugauguucagauuaccuaaa

SEQ ID NO: 47455 - RNA, 20 nt, Artificial Sequence
  RPE65 RNA guide
ugauucagauugagugcagc

SEQ ID NO: 47456 - RNA, 20 nt, Artificial Sequence
  RPE65 RNA guide
ugauucuugccuuuuuaagc

SEQ ID NO: 47457 - RNA, 20 nt, Artificial Sequence
  RPE65 RNA guide
ugauugaaaacuaaucgggu

SEQ ID NO: 47458 - RNA, 20 nt, Artificial Sequence
  RPE65 RNA guide
ugauuuggcuagucugaaaa

SEQ ID NO: 47459 - RNA, 20 nt, Artificial Sequence
  RPE65 RNA guide
ugcacucaaucugaaucaca

SEQ ID NO: 47460 - RNA, 20 nt, Artificial Sequence
  RPE65 RNA guide
ugcagcagcucuguaaaaac

SEQ ID NO: 47461 - RNA, 20 nt, Artificial Sequence
  RPE65 RNA guide
ugccugccuguucuuuauuc

SEQ ID NO: 47462 - RNA, 20 nt, Artificial Sequence
  RPE65 RNA guide
ugccugugcucauguuugac

SEQ ID NO: 47463 - RNA, 20 nt, Artificial Sequence
  RPE65 RNA guide
ugccuguucuuuauuccaca

SEQ ID NO: 47464 - RNA, 20 nt, Artificial Sequence
  RPE65 RNA guide
ugccuuuuuaagcacaagug

SEQ ID NO: 47465 - RNA, 20 nt, Artificial Sequence
  RPE65 RNA guide
ugcgaagggagaaaaagaca

SEQ ID NO: 47466 - RNA, 20 nt, Artificial Sequence
  RPE65 RNA guide
ugcguuuuucagacuagcca

SEQ ID NO: 47467 - RNA, 20 nt, Artificial Sequence
  RPE65 RNA guide
ugcuauugagccagguguau

SEQ ID NO: 47468 - RNA, 20 nt, Artificial Sequence
  RPE65 RNA guide
ugcugcacucaaucugaauc

SEQ ID NO: 47469 - RNA, 20 nt, Artificial Sequence
  RPE65 RNA guide
ugcuguugucuucuuaguga

SEQ ID NO: 47470 - RNA, 20 nt, Artificial Sequence
  RPE65 RNA guide
ugcuguuuuagaugugauuc

SEQ ID NO: 47471 - RNA, 20 nt, Artificial Sequence
  RPE65 RNA guide
ugcuuaaaaaggcaagaauc

SEQ ID NO: 47472 - RNA, 20 nt, Artificial Sequence
  RPE65 RNA guide
ugcuuuauuuucauccugug

SEQ ID NO: 47473 - RNA, 20 nt, Artificial Sequence
  RPE65 RNA guide
uggaaaagcaguaggaaguu

SEQ ID NO: 47474 - RNA, 20 nt, Artificial Sequence
  RPE65 RNA guide
uggaaauuacgggguuuuua

SEQ ID NO: 47475 - RNA, 20 nt, Artificial Sequence
  RPE65 RNA guide
uggaauaaagaacaggcagg

SEQ ID NO: 47476 - RNA, 20 nt, Artificial Sequence
  RPE65 RNA guide
uggacaaaugggacaccucc

SEQ ID NO: 47477 - RNA, 20 nt, Artificial Sequence
  RPE65 RNA guide
uggacccgauuaguuuucaa

SEQ ID NO: 47478 - RNA, 20 nt, Artificial Sequence
  RPE65 RNA guide
uggauuuguuuaaguaacag

SEQ ID NO: 47479 - RNA, 20 nt, Artificial Sequence
  RPE65 RNA guide
uggcuagucugaaaaacgca

SEQ ID NO: 47480 - RNA, 20 nt, Artificial Sequence
  RPE65 RNA guide
uggcucaauagcaguuucug

SEQ ID NO: 47481 - RNA, 20 nt, Artificial Sequence
  RPE65 RNA guide
uggcucugauacaccuggcu

SEQ ID NO: 47482 - RNA, 20 nt, Artificial Sequence
  RPE65 RNA guide
ugggacaccucccauuguuc

SEQ ID NO: 47483 - RNA, 20 nt, Artificial Sequence
  RPE65 RNA guide
ugggaggugucccauuuguc

SEQ ID NO: 47484 - RNA, 20 nt, Artificial Sequence
  RPE65 RNA guide
ugggcgggaggaaauggcuc

SEQ ID NO: 47485 - RNA, 20 nt, Artificial Sequence
  RPE65 RNA guide
uggggaaacuugagccccau

SEQ ID NO: 47486 - RNA, 20 nt, Artificial Sequence
  RPE65 RNA guide
ugggguucauggacccgauu

SEQ ID NO: 47487 - RNA, 20 nt, Artificial Sequence
  RPE65 RNA guide
uggguuguggaauaaagaac

SEQ ID NO: 47488 - RNA, 20 nt, Artificial Sequence
  RPE65 RNA guide
uggugacaggaagacagaac

SEQ ID NO: 47489 - RNA, 20 nt, Artificial Sequence
  RPE65 RNA guide
uguaaaaaccccguaauuuc

SEQ ID NO: 47490 - RNA, 20 nt, Artificial Sequence
  RPE65 RNA guide
uguaauuggaaaagcaguag

SEQ ID NO: 47491 - RNA, 20 nt, Artificial Sequence
  RPE65 RNA guide
uguaucagagccauuuccuc

SEQ ID NO: 47492 - RNA, 20 nt, Artificial Sequence
  RPE65 RNA guide
ugucaacuuuaaguucaccu

SEQ ID NO: 47493 - RNA, 20 nt, Artificial Sequence
  RPE65 RNA guide
ugucaccauucuguuugugu

SEQ ID NO: 47494 - RNA, 20 nt, Artificial Sequence
  RPE65 RNA guide
ugucauugccugugcucaug

SEQ ID NO: 47495 - RNA, 20 nt, Artificial Sequence
  RPE65 RNA guide
ugucccauuuguccaguguc

SEQ ID NO: 47496 - RNA, 20 nt, Artificial Sequence
  RPE65 RNA guide
ugucuuccugucaccauucu

SEQ ID NO: 47497 - RNA, 20 nt, Artificial Sequence
  RPE65 RNA guide
ugucuucuuagugauuuggc

SEQ ID NO: 47498 - RNA, 20 nt, Artificial Sequence
  RPE65 RNA guide
ugucuuuuucucccuucgca

SEQ ID NO: 47499 - RNA, 20 nt, Artificial Sequence
  RPE65 RNA guide
ugugaccugagaggugaacu

SEQ ID NO: 47500 - RNA, 20 nt, Artificial Sequence
  RPE65 RNA guide
ugugagagucaaaaauguaa

SEQ ID NO: 47501 - RNA, 20 nt, Artificial Sequence
  RPE65 RNA guide
ugugauucagauugagugca

SEQ ID NO: 47502 - RNA, 20 nt, Artificial Sequence
  RPE65 RNA guide
ugugcuuaaaaaggcaagaa

SEQ ID NO: 47503 - RNA, 20 nt, Artificial Sequence
  RPE65 RNA guide
uguggaauaaagaacaggca

SEQ ID NO: 47504 - RNA, 20 nt, Artificial Sequence
  RPE65 RNA guide
ugugggcgggaggaaauggc

SEQ ID NO: 47505 - RNA, 20 nt, Artificial Sequence
  RPE65 RNA guide
ugugugggcgggaggaaaug

SEQ ID NO: 47506 - RNA, 20 nt, Artificial Sequence
  RPE65 RNA guide
uguucagauuaccuaaacuu

SEQ ID NO: 47507 - RNA, 20 nt, Artificial Sequence
  RPE65 RNA guide
uguuccuggaaauuacgggg

SEQ ID NO: 47508 - RNA, 20 nt, Artificial Sequence
  RPE65 RNA guide
uguucugucuuccugucacc

SEQ ID NO: 47509 - RNA, 20 nt, Artificial Sequence
  RPE65 RNA guide
uguucuuuauuccacaaccc

SEQ ID NO: 47510 - RNA, 20 nt, Artificial Sequence
  RPE65 RNA guide
uguugucuucuuagugauuu

SEQ ID NO: 47511 - RNA, 20 nt, Artificial Sequence
  RPE65 RNA guide
uguuuaaguaacagcagccu

SEQ ID NO: 47512 - RNA, 20 nt, Artificial Sequence
  RPE65 RNA guide
uguuuucaggugggguucau

SEQ ID NO: 47513 - RNA, 20 nt, Artificial Sequence
  RPE65 RNA guide
uuaaaaaggcaagaaucauc

SEQ ID NO: 47514 - RNA, 20 nt, Artificial Sequence
  RPE65 RNA guide
uuaagcacaagugccugccu

SEQ ID NO: 47515 - RNA, 20 nt, Artificial Sequence
  RPE65 RNA guide
uuaaguaacagcagccuuga

SEQ ID NO: 47516 - RNA, 20 nt, Artificial Sequence
  RPE65 RNA guide
uuaaguucaccucucagguc

SEQ ID NO: 47517 - RNA, 20 nt, Artificial Sequence
  RPE65 RNA guide
uuacagagcugcugcacuca

SEQ ID NO: 47518 - RNA, 20 nt, Artificial Sequence
  RPE65 RNA guide
uuaccuaaacuuccuacugc

SEQ ID NO: 47519 - RNA, 20 nt, Artificial Sequence
  RPE65 RNA guide
uuacgggguuuuuacagagc

SEQ ID NO: 47520 - RNA, 20 nt, Artificial Sequence
  RPE65 RNA guide
uuagagagaugauucuugcc

SEQ ID NO: 47521 - RNA, 20 nt, Artificial Sequence
  RPE65 RNA guide
uuagaugugauucagauuga

SEQ ID NO: 47522 - RNA, 20 nt, Artificial Sequence
  RPE65 RNA guide
uuagugauuuggcuagucug

SEQ ID NO: 47523 - RNA, 20 nt, Artificial Sequence
  RPE65 RNA guide
uuauuccacaacccagaaac

SEQ ID NO: 47524 - RNA, 20 nt, Artificial Sequence
  RPE65 RNA guide
uuauuugucauugccugugc

SEQ ID NO: 47525 - RNA, 20 nt, Artificial Sequence
  RPE65 RNA guide
uuauuuucauccuguguggg

SEQ ID NO: 47526 - RNA, 20 nt, Artificial Sequence
  RPE65 RNA guide
uucaccucucaggucacaga

SEQ ID NO: 47527 - RNA, 20 nt, Artificial Sequence
  RPE65 RNA guide
uucagacuagccaaaucacu

SEQ ID NO: 47528 - RNA, 20 nt, Artificial Sequence
  RPE65 RNA guide
uucagauuaccuaaacuucc

SEQ ID NO: 47529 - RNA, 20 nt, Artificial Sequence
  RPE65 RNA guide
uucagauugagugcagcagc

SEQ ID NO: 47530 - RNA, 20 nt, Artificial Sequence
  RPE65 RNA guide
uucaggugggguucauggac

SEQ ID NO: 47531 - RNA, 20 nt, Artificial Sequence
  RPE65 RNA guide
uucauccugugugggcggga

SEQ ID NO: 47532 - RNA, 20 nt, Artificial Sequence
  RPE65 RNA guide
uucauggacccgauuaguuu

SEQ ID NO: 47533 - RNA, 20 nt, Artificial Sequence
  RPE65 RNA guide
uuccacaacccagaaacugc

SEQ ID NO: 47534 - RNA, 20 nt, Artificial Sequence
  RPE65 RNA guide
uuccaggaacaaugggaggu

SEQ ID NO: 47535 - RNA, 20 nt, Artificial Sequence
  RPE65 RNA guide
uuccuacugcuuuuccaauu

SEQ ID NO: 47536 - RNA, 20 nt, Artificial Sequence
  RPE65 RNA guide
uuccucccgcccacacagga

SEQ ID NO: 47537 - RNA, 20 nt, Artificial Sequence
  RPE65 RNA guide
uuccuggaaauuacgggguu

SEQ ID NO: 47538 - RNA, 20 nt, Artificial Sequence
  RPE65 RNA guide
uuccugucaccauucuguuu

SEQ ID NO: 47539 - RNA, 20 nt, Artificial Sequence
  RPE65 RNA guide
uucgcagagaagauggggcu

SEQ ID NO: 47540 - RNA, 20 nt, Artificial Sequence
  RPE65 RNA guide
uucucccuucgcagagaaga

SEQ ID NO: 47541 - RNA, 20 nt, Artificial Sequence
  RPE65 RNA guide
uucucugcgaagggagaaaa

SEQ ID NO: 47542 - RNA, 20 nt, Artificial Sequence
  RPE65 RNA guide
uucuggguuguggaauaaag

SEQ ID NO: 47543 - RNA, 20 nt, Artificial Sequence
  RPE65 RNA guide
uucugucuuccugucaccau

SEQ ID NO: 47544 - RNA, 20 nt, Artificial Sequence
  RPE65 RNA guide
uucugugaccugagagguga

SEQ ID NO: 47545 - RNA, 20 nt, Artificial Sequence
  RPE65 RNA guide
uucuguucugucuuccuguc

SEQ ID NO: 47546 - RNA, 20 nt, Artificial Sequence
  RPE65 RNA guide
uucuuagugauuuggcuagu

SEQ ID NO: 47547 - RNA, 20 nt, Artificial Sequence
  RPE65 RNA guide
uucuugccuuuuuaagcaca

SEQ ID NO: 47548 - RNA, 20 nt, Artificial Sequence
  RPE65 RNA guide
uucuuuauuccacaacccag

SEQ ID NO: 47549 - RNA, 20 nt, Artificial Sequence
  RPE65 RNA guide
uugaaaacuaaucgggucca

SEQ ID NO: 47550 - RNA, 20 nt, Artificial Sequence
  RPE65 RNA guide
uugagauacuuucuguucug

SEQ ID NO: 47551 - RNA, 20 nt, Artificial Sequence
  RPE65 RNA guide
uugagccagguguaucagag

SEQ ID NO: 47552 - RNA, 20 nt, Artificial Sequence
  RPE65 RNA guide
uugagccccaucuucucugc

SEQ ID NO: 47553 - RNA, 20 nt, Artificial Sequence
  RPE65 RNA guide
uugagugcagcagcucugua

SEQ ID NO: 47554 - RNA, 20 nt, Artificial Sequence
  RPE65 RNA guide
uugccugugcucauguuuga

SEQ ID NO: 47555 - RNA, 20 nt, Artificial Sequence
  RPE65 RNA guide
uugccuuuuuaagcacaagu

SEQ ID NO: 47556 - RNA, 20 nt, Artificial Sequence
  RPE65 RNA guide
uugcuguuuuagaugugauu

SEQ ID NO: 47557 - RNA, 20 nt, Artificial Sequence
  RPE65 RNA guide
uugcuuuauuuucauccugu

SEQ ID NO: 47558 - RNA, 20 nt, Artificial Sequence
  RPE65 RNA guide
uuggaaaagcaguaggaagu

SEQ ID NO: 47559 - RNA, 20 nt, Artificial Sequence
  RPE65 RNA guide
uuggcuagucugaaaaacgc

SEQ ID NO: 47560 - RNA, 20 nt, Artificial Sequence
  RPE65 RNA guide
uugucaacuuuaaguucacc

SEQ ID NO: 47561 - RNA, 20 nt, Artificial Sequence
  RPE65 RNA guide
uugucauugccugugcucau

SEQ ID NO: 47562 - RNA, 20 nt, Artificial Sequence
  RPE65 RNA guide
uugucuucuuagugauuugg

SEQ ID NO: 47563 - RNA, 20 nt, Artificial Sequence
  RPE65 RNA guide
uugugcuuaaaaaggcaaga

SEQ ID NO: 47564 - RNA, 20 nt, Artificial Sequence
  RPE65 RNA guide
uuguggaauaaagaacaggc

SEQ ID NO: 47565 - RNA, 20 nt, Artificial Sequence
  RPE65 RNA guide
uuguuccuggaaauuacggg

SEQ ID NO: 47566 - RNA, 20 nt, Artificial Sequence
  RPE65 RNA guide
uuguuuaaguaacagcagcc

SEQ ID NO: 47567 - RNA, 20 nt, Artificial Sequence
  RPE65 RNA guide
uuguuuucaggugggguuca

SEQ ID NO: 47568 - RNA, 20 nt, Artificial Sequence
  RPE65 RNA guide
uuuaagcacaagugccugcc

SEQ ID NO: 47569 - RNA, 20 nt, Artificial Sequence
  RPE65 RNA guide
uuuaaguaacagcagccuug

SEQ ID NO: 47570 - RNA, 20 nt, Artificial Sequence
  RPE65 RNA guide
uuuaaguucaccucucaggu

SEQ ID NO: 47571 - RNA, 20 nt, Artificial Sequence
  RPE65 RNA guide
uuuacagagcugcugcacuc

SEQ ID NO: 47572 - RNA, 20 nt, Artificial Sequence
  RPE65 RNA guide
uuuagagagaugauucuugc

SEQ ID NO: 47573 - RNA, 20 nt, Artificial Sequence
  RPE65 RNA guide
uuuagaugugauucagauug

SEQ ID NO: 47574 - RNA, 20 nt, Artificial Sequence
  RPE65 RNA guide
uuuauuccacaacccagaaa

SEQ ID NO: 47575 - RNA, 20 nt, Artificial Sequence
  RPE65 RNA guide
uuuauuuucauccugugugg

SEQ ID NO: 47576 - RNA, 20 nt, Artificial Sequence
  RPE65 RNA guide
uuucagacuagccaaaucac

SEQ ID NO: 47577 - RNA, 20 nt, Artificial Sequence
  RPE65 RNA guide
uuucaggugggguucaugga

SEQ ID NO: 47578 - RNA, 20 nt, Artificial Sequence
  RPE65 RNA guide
uuucauccugugugggcggg

SEQ ID NO: 47579 - RNA, 20 nt, Artificial Sequence
  RPE65 RNA guide
uuuccaggaacaaugggagg

SEQ ID NO: 47580 - RNA, 20 nt, Artificial Sequence
  RPE65 RNA guide
uuuccucccgcccacacagg

SEQ ID NO: 47581 - RNA, 20 nt, Artificial Sequence
  RPE65 RNA guide
uuucucccuucgcagagaag

SEQ ID NO: 47582 - RNA, 20 nt, Artificial Sequence
  RPE65 RNA guide
uuucuggguuguggaauaaa

SEQ ID NO: 47583 - RNA, 20 nt, Artificial Sequence
  RPE65 RNA guide
uuucuguucugucuuccugu

SEQ ID NO: 47584 - RNA, 20 nt, Artificial Sequence
  RPE65 RNA guide
uuuggcuagucugaaaaacg

SEQ ID NO: 47585 - RNA, 20 nt, Artificial Sequence
  RPE65 RNA guide
uuugucaacuuuaaguucac

SEQ ID NO: 47586 - RNA, 20 nt, Artificial Sequence
  RPE65 RNA guide
uuugucauugccugugcuca

SEQ ID NO: 47587 - RNA, 20 nt, Artificial Sequence
  RPE65 RNA guide
uuuguuuaaguaacagcagc

SEQ ID NO: 47588 - RNA, 20 nt, Artificial Sequence
  RPE65 RNA guide
uuuguuuucaggugggguuc

SEQ ID NO: 47589 - RNA, 20 nt, Artificial Sequence
  RPE65 RNA guide
uuuuaagcacaagugccugc

SEQ ID NO: 47590 - RNA, 20 nt, Artificial Sequence
  RPE65 RNA guide
uuuuacagagcugcugcacu

SEQ ID NO: 47591 - RNA, 20 nt, Artificial Sequence
  RPE65 RNA guide
uuuuagagagaugauucuug

SEQ ID NO: 47592 - RNA, 20 nt, Artificial Sequence
  RPE65 RNA guide
uuuucagacuagccaaauca

SEQ ID NO: 47593 - RNA, 20 nt, Artificial Sequence
  RPE65 RNA guide
uuuucaggugggguucaugg

SEQ ID NO: 47594 - RNA, 20 nt, Artificial Sequence
  RPE65 RNA guide
uuuucauccugugugggcgg

SEQ ID NO: 47595 - RNA, 20 nt, Artificial Sequence
  RPE65 RNA guide
uuuucucccuucgcagagaa

SEQ ID NO: 47596 - RNA, 20 nt, Artificial Sequence
  RPE65 RNA guide
uuuugucaacuuuaaguuca

SEQ ID NO: 47597 - RNA, 20 nt, Artificial Sequence
  RPE65 RNA guide
uuuuguuuucaggugggguu

SEQ ID NO: 47598 - RNA, 20 nt, Artificial Sequence
  RPE65 RNA guide
uuuuuaagcacaagugccug

SEQ ID NO: 47599 - RNA, 20 nt, Artificial Sequence
  RPE65 RNA guide
uuuuuacagagcugcugcac

SEQ ID NO: 47600 - RNA, 20 nt, Artificial Sequence
  RPE65 RNA guide
uuuuucagacuagccaaauc

SEQ ID NO: 47601 - RNA, 20 nt, Artificial Sequence
  RPE65 RNA guide
uuuuucucccuucgcagaga

SEQ ID NO: 47602 - RNA, 21 nt, Artificial Sequence
  RPE65 RNA guide
aaaaaccccguaauuuccagg

SEQ ID NO: 47603 - RNA, 21 nt, Artificial Sequence
  RPE65 RNA guide
aaaaacgcaugucuuuuucuc

SEQ ID NO: 47604 - RNA, 21 nt, Artificial Sequence
  RPE65 RNA guide
aaaaagacaugcguuuuucag

SEQ ID NO: 47605 - RNA, 21 nt, Artificial Sequence
  RPE65 RNA guide
aaaaaggcaagaaucaucucu

SEQ ID NO: 47606 - RNA, 21 nt, Artificial Sequence
  RPE65 RNA guide
aaaaagucaaacaugagcaca

SEQ ID NO: 47607 - RNA, 21 nt, Artificial Sequence
  RPE65 RNA guide
aaaacaaaagauucugugacc

SEQ ID NO: 47608 - RNA, 21 nt, Artificial Sequence
  RPE65 RNA guide
aaaaccccguaauuuccagga

SEQ ID NO: 47609 - RNA, 21 nt, Artificial Sequence
  RPE65 RNA guide
aaaacgcaugucuuuuucucc

SEQ ID NO: 47610 - RNA, 21 nt, Artificial Sequence
  RPE65 RNA guide
aaaacuaaucggguccaugaa

SEQ ID NO: 47611 - RNA, 21 nt, Artificial Sequence
  RPE65 RNA guide
aaaagacaugcguuuuucaga

SEQ ID NO: 47612 - RNA, 21 nt, Artificial Sequence
  RPE65 RNA guide
aaaagauucugugaccugaga

SEQ ID NO: 47613 - RNA, 21 nt, Artificial Sequence
  RPE65 RNA guide
aaaagcaguaggaaguuuagg

SEQ ID NO: 47614 - RNA, 21 nt, Artificial Sequence
  RPE65 RNA guide
aaaaggcaagaaucaucucuc

SEQ ID NO: 47615 - RNA, 21 nt, Artificial Sequence
  RPE65 RNA guide
aaaagucaaacaugagcacag

SEQ ID NO: 47616 - RNA, 21 nt, Artificial Sequence
  RPE65 RNA guide
aaaauaaagcaaccugcuuaa

SEQ ID NO: 47617 - RNA, 21 nt, Artificial Sequence
  RPE65 RNA guide
aaaauguaauuggaaaagcag

SEQ ID NO: 47618 - RNA, 21 nt, Artificial Sequence
  RPE65 RNA guide
aaaauuauuugucauugccug

SEQ ID NO: 47619 - RNA, 21 nt, Artificial Sequence
  RPE65 RNA guide
aaacaaaagauucugugaccu

SEQ ID NO: 47620 - RNA, 21 nt, Artificial Sequence
  RPE65 RNA guide
aaacaaauccauuaagcaggu

SEQ ID NO: 47621 - RNA, 21 nt, Artificial Sequence
  RPE65 RNA guide
aaacagaauggugacaggaag

SEQ ID NO: 47622 - RNA, 21 nt, Artificial Sequence
  RPE65 RNA guide
aaacaugagcacaggcaauga

SEQ ID NO: 47623 - RNA, 21 nt, Artificial Sequence
  RPE65 RNA guide
aaaccccguaauuuccaggaa

SEQ ID NO: 47624 - RNA, 21 nt, Artificial Sequence
  RPE65 RNA guide
aaacgcaugucuuuuucuccc

SEQ ID NO: 47625 - RNA, 21 nt, Artificial Sequence
  RPE65 RNA guide
aaacuaaucggguccaugaac

SEQ ID NO: 47626 - RNA, 21 nt, Artificial Sequence
  RPE65 RNA guide
aaacugcuauugagccaggug

SEQ ID NO: 47627 - RNA, 21 nt, Artificial Sequence
  RPE65 RNA guide
aaacuuccuacugcuuuucca

SEQ ID NO: 47628 - RNA, 21 nt, Artificial Sequence
  RPE65 RNA guide
aaacuugagccccaucuucuc

SEQ ID NO: 47629 - RNA, 21 nt, Artificial Sequence
  RPE65 RNA guide
aaagaacaggcaggcacuugu

SEQ ID NO: 47630 - RNA, 21 nt, Artificial Sequence
  RPE65 RNA guide
aaagacaugcguuuuucagac

SEQ ID NO: 47631 - RNA, 21 nt, Artificial Sequence
  RPE65 RNA guide
aaagauucugugaccugagag

SEQ ID NO: 47632 - RNA, 21 nt, Artificial Sequence
  RPE65 RNA guide
aaagcaaccugcuuaauggau

SEQ ID NO: 47633 - RNA, 21 nt, Artificial Sequence
  RPE65 RNA guide
aaagcaguaggaaguuuaggu

SEQ ID NO: 47634 - RNA, 21 nt, Artificial Sequence
  RPE65 RNA guide
aaaggacacuggacaaauggg

SEQ ID NO: 47635 - RNA, 21 nt, Artificial Sequence
  RPE65 RNA guide
aaaggcaagaaucaucucucu

SEQ ID NO: 47636 - RNA, 21 nt, Artificial Sequence
  RPE65 RNA guide
aaaguaucucaaggcugcugu

SEQ ID NO: 47637 - RNA, 21 nt, Artificial Sequence
  RPE65 RNA guide
aaagucaaacaugagcacagg

SEQ ID NO: 47638 - RNA, 21 nt, Artificial Sequence
  RPE65 RNA guide
aaauaaagcaaccugcuuaau

SEQ ID NO: 47639 - RNA, 21 nt, Artificial Sequence
  RPE65 RNA guide
aaauccauuaagcagguugcu

SEQ ID NO: 47640 - RNA, 21 nt, Artificial Sequence
  RPE65 RNA guide
aaauggcucugauacaccugg

SEQ ID NO: 47641 - RNA, 21 nt, Artificial Sequence
  RPE65 RNA guide
aaaugggacaccucccauugu

SEQ ID NO: 47642 - RNA, 21 nt, Artificial Sequence
  RPE65 RNA guide
aaauguaauuggaaaagcagu

SEQ ID NO: 47643 - RNA, 21 nt, Artificial Sequence
  RPE65 RNA guide
aaauuacgggguuuuuacaga

SEQ ID NO: 47644 - RNA, 21 nt, Artificial Sequence
  RPE65 RNA guide
aaauuauuugucauugccugu

SEQ ID NO: 47645 - RNA, 21 nt, Artificial Sequence
  RPE65 RNA guide
aacaaaagauucugugaccug

SEQ ID NO: 47646 - RNA, 21 nt, Artificial Sequence
  RPE65 RNA guide
aacaaauccauuaagcagguu

SEQ ID NO: 47647 - RNA, 21 nt, Artificial Sequence
  RPE65 RNA guide
aacaaugggaggugucccauu

SEQ ID NO: 47648 - RNA, 21 nt, Artificial Sequence
  RPE65 RNA guide
aacagaaaguaucucaaggcu

SEQ ID NO: 47649 - RNA, 21 nt, Artificial Sequence
  RPE65 RNA guide
aacagaauggugacaggaaga

SEQ ID NO: 47650 - RNA, 21 nt, Artificial Sequence
  RPE65 RNA guide
aacagcagccuugagauacuu

SEQ ID NO: 47651 - RNA, 21 nt, Artificial Sequence
  RPE65 RNA guide
aacaggcaggcacuugugcuu

SEQ ID NO: 47652 - RNA, 21 nt, Artificial Sequence
  RPE65 RNA guide
aacaugagcacaggcaaugac

SEQ ID NO: 47653 - RNA, 21 nt, Artificial Sequence
  RPE65 RNA guide
aacccagaaacugcuauugag

SEQ ID NO: 47654 - RNA, 21 nt, Artificial Sequence
  RPE65 RNA guide
aaccccaccugaaaacaaaag

SEQ ID NO: 47655 - RNA, 21 nt, Artificial Sequence
  RPE65 RNA guide
aaccccguaauuuccaggaac

SEQ ID NO: 47656 - RNA, 21 nt, Artificial Sequence
  RPE65 RNA guide
aaccugcuuaauggauuuguu

SEQ ID NO: 47657 - RNA, 21 nt, Artificial Sequence
  RPE65 RNA guide
aacgcaugucuuuuucucccu

SEQ ID NO: 47658 - RNA, 21 nt, Artificial Sequence
  RPE65 RNA guide
aacuaaucggguccaugaacc

SEQ ID NO: 47659 - RNA, 21 nt, Artificial Sequence
  RPE65 RNA guide
aacucuugcuguuuuagaugu

SEQ ID NO: 47660 - RNA, 21 nt, Artificial Sequence
  RPE65 RNA guide
aacugcuauugagccaggugu

SEQ ID NO: 47661 - RNA, 21 nt, Artificial Sequence
  RPE65 RNA guide
aacuuaaaguugacaaaaucc

SEQ ID NO: 47662 - RNA, 21 nt, Artificial Sequence
  RPE65 RNA guide
aacuuccuacugcuuuuccaa

SEQ ID NO: 47663 - RNA, 21 nt, Artificial Sequence
  RPE65 RNA guide
aacuugagccccaucuucucu

SEQ ID NO: 47664 - RNA, 21 nt, Artificial Sequence
  RPE65 RNA guide
aacuuuaaguucaccucucag

SEQ ID NO: 47665 - RNA, 21 nt, Artificial Sequence
  RPE65 RNA guide
aagaaaggacacuggacaaau

SEQ ID NO: 47666 - RNA, 21 nt, Artificial Sequence
  RPE65 RNA guide
aagaacaggcaggcacuugug

SEQ ID NO: 47667 - RNA, 21 nt, Artificial Sequence
  RPE65 RNA guide
aagacagaacagaaaguaucu

SEQ ID NO: 47668 - RNA, 21 nt, Artificial Sequence
  RPE65 RNA guide
aagacaugcguuuuucagacu

SEQ ID NO: 47669 - RNA, 21 nt, Artificial Sequence
  RPE65 RNA guide
aagauucugugaccugagagg

SEQ ID NO: 47670 - RNA, 21 nt, Artificial Sequence
  RPE65 RNA guide
aagcaaccugcuuaauggauu

SEQ ID NO: 47671 - RNA, 21 nt, Artificial Sequence
  RPE65 RNA guide
aagcacaagugccugccuguu

SEQ ID NO: 47672 - RNA, 21 nt, Artificial Sequence
  RPE65 RNA guide
aagcagguugcuuuauuuuca

SEQ ID NO: 47673 - RNA, 21 nt, Artificial Sequence
  RPE65 RNA guide
aagcaguaggaaguuuaggua

SEQ ID NO: 47674 - RNA, 21 nt, Artificial Sequence
  RPE65 RNA guide
aaggacacaaacagaauggug

SEQ ID NO: 47675 - RNA, 21 nt, Artificial Sequence
  RPE65 RNA guide
aaggacacuggacaaauggga

SEQ ID NO: 47676 - RNA, 21 nt, Artificial Sequence
  RPE65 RNA guide
aaggcaagaaucaucucucua

SEQ ID NO: 47677 - RNA, 21 nt, Artificial Sequence
  RPE65 RNA guide
aaggcugcuguuacuuaaaca

SEQ ID NO: 47678 - RNA, 21 nt, Artificial Sequence
  RPE65 RNA guide
aagggagaaaaagacaugcgu

SEQ ID NO: 47679 - RNA, 21 nt, Artificial Sequence
  RPE65 RNA guide
aaguaacagcagccuugagau

SEQ ID NO: 47680 - RNA, 21 nt, Artificial Sequence
  RPE65 RNA guide
aaguaucucaaggcugcuguu

SEQ ID NO: 47681 - RNA, 21 nt, Artificial Sequence
  RPE65 RNA guide
aagucaaacaugagcacaggc

SEQ ID NO: 47682 - RNA, 21 nt, Artificial Sequence
  RPE65 RNA guide
aagugccugccuguucuuuau

SEQ ID NO: 47683 - RNA, 21 nt, Artificial Sequence
  RPE65 RNA guide
aaguucaccucucaggucaca

SEQ ID NO: 47684 - RNA, 21 nt, Artificial Sequence
  RPE65 RNA guide
aauaaaaagucaaacaugagc

SEQ ID NO: 47685 - RNA, 21 nt, Artificial Sequence
  RPE65 RNA guide
aauaaagaacaggcaggcacu

SEQ ID NO: 47686 - RNA, 21 nt, Artificial Sequence
  RPE65 RNA guide
aauaaagcaaccugcuuaaug

SEQ ID NO: 47687 - RNA, 21 nt, Artificial Sequence
  RPE65 RNA guide
aauagcaguuucuggguugug

SEQ ID NO: 47688 - RNA, 21 nt, Artificial Sequence
  RPE65 RNA guide
aaucacaucuaaaacagcaag

SEQ ID NO: 47689 - RNA, 21 nt, Artificial Sequence
  RPE65 RNA guide
aauccauuaagcagguugcuu

SEQ ID NO: 47690 - RNA, 21 nt, Artificial Sequence
  RPE65 RNA guide
aaucggguccaugaaccccac

SEQ ID NO: 47691 - RNA, 21 nt, Artificial Sequence
  RPE65 RNA guide
aaucugaaucacaucuaaaac

SEQ ID NO: 47692 - RNA, 21 nt, Artificial Sequence
  RPE65 RNA guide
aaucuuuuguuuucagguggg

SEQ ID NO: 47693 - RNA, 21 nt, Artificial Sequence
  RPE65 RNA guide
aaugauugaaaacuaaucggg

SEQ ID NO: 47694 - RNA, 21 nt, Artificial Sequence
  RPE65 RNA guide
aauggauuuguuuaaguaaca

SEQ ID NO: 47695 - RNA, 21 nt, Artificial Sequence
  RPE65 RNA guide
aauggcucugauacaccuggc

SEQ ID NO: 47696 - RNA, 21 nt, Artificial Sequence
  RPE65 RNA guide
aaugggacaccucccauuguu

SEQ ID NO: 47697 - RNA, 21 nt, Artificial Sequence
  RPE65 RNA guide
aaugggaggugucccauuugu

SEQ ID NO: 47698 - RNA, 21 nt, Artificial Sequence
  RPE65 RNA guide
aauggugacaggaagacagaa

SEQ ID NO: 47699 - RNA, 21 nt, Artificial Sequence
  RPE65 RNA guide
aauguaauuggaaaagcagua

SEQ ID NO: 47700 - RNA, 21 nt, Artificial Sequence
  RPE65 RNA guide
aauuacgggguuuuuacagag

SEQ ID NO: 47701 - RNA, 21 nt, Artificial Sequence
  RPE65 RNA guide
aauuauuugucauugccugug

SEQ ID NO: 47702 - RNA, 21 nt, Artificial Sequence
  RPE65 RNA guide
aauuggaaaagcaguaggaag

SEQ ID NO: 47703 - RNA, 21 nt, Artificial Sequence
  RPE65 RNA guide
aauuuccaggaacaaugggag

SEQ ID NO: 47704 - RNA, 21 nt, Artificial Sequence
  RPE65 RNA guide
aauuuuagagagaugauucuu

SEQ ID NO: 47705 - RNA, 21 nt, Artificial Sequence
  RPE65 RNA guide
acaaaagauucugugaccuga

SEQ ID NO: 47706 - RNA, 21 nt, Artificial Sequence
  RPE65 RNA guide
acaaacagaauggugacagga

SEQ ID NO: 47707 - RNA, 21 nt, Artificial Sequence
  RPE65 RNA guide
acaaauccauuaagcagguug

SEQ ID NO: 47708 - RNA, 21 nt, Artificial Sequence
  RPE65 RNA guide
acaaaugggacaccucccauu

SEQ ID NO: 47709 - RNA, 21 nt, Artificial Sequence
  RPE65 RNA guide
acaacccagaaacugcuauug

SEQ ID NO: 47710 - RNA, 21 nt, Artificial Sequence
  RPE65 RNA guide
acaagugccugccuguucuuu

SEQ ID NO: 47711 - RNA, 21 nt, Artificial Sequence
  RPE65 RNA guide
acaaugggaggugucccauuu

SEQ ID NO: 47712 - RNA, 21 nt, Artificial Sequence
  RPE65 RNA guide
acacaaacagaauggugacag

SEQ ID NO: 47713 - RNA, 21 nt, Artificial Sequence
  RPE65 RNA guide
acacaggaugaaaauaaagca

SEQ ID NO: 47714 - RNA, 21 nt, Artificial Sequence
  RPE65 RNA guide
acaccucccauuguuccugga

SEQ ID NO: 47715 - RNA, 21 nt, Artificial Sequence
  RPE65 RNA guide
acaccuggcucaauagcaguu

SEQ ID NO: 47716 - RNA, 21 nt, Artificial Sequence
  RPE65 RNA guide
acacuggacaaaugggacacc

SEQ ID NO: 47717 - RNA, 21 nt, Artificial Sequence
  RPE65 RNA guide
acagaaaguaucucaaggcug

SEQ ID NO: 47718 - RNA, 21 nt, Artificial Sequence
  RPE65 RNA guide
acagaacagaaaguaucucaa

SEQ ID NO: 47719 - RNA, 21 nt, Artificial Sequence
  RPE65 RNA guide
acagaaucuuuuguuuucagg

SEQ ID NO: 47720 - RNA, 21 nt, Artificial Sequence
  RPE65 RNA guide
acagaauggugacaggaagac

SEQ ID NO: 47721 - RNA, 21 nt, Artificial Sequence
  RPE65 RNA guide
acagagcugcugcacucaauc

SEQ ID NO: 47722 - RNA, 21 nt, Artificial Sequence
  RPE65 RNA guide
acagcagccuugagauacuuu

SEQ ID NO: 47723 - RNA, 21 nt, Artificial Sequence
  RPE65 RNA guide
acaggaagacagaacagaaag

SEQ ID NO: 47724 - RNA, 21 nt, Artificial Sequence
  RPE65 RNA guide
acaggaugaaaauaaagcaac

SEQ ID NO: 47725 - RNA, 21 nt, Artificial Sequence
  RPE65 RNA guide
acaggcaggcacuugugcuua

SEQ ID NO: 47726 - RNA, 21 nt, Artificial Sequence
  RPE65 RNA guide
acaugagcacaggcaaugaca

SEQ ID NO: 47727 - RNA, 21 nt, Artificial Sequence
  RPE65 RNA guide
acaugcguuuuucagacuagc

SEQ ID NO: 47728 - RNA, 21 nt, Artificial Sequence
  RPE65 RNA guide
acauuuuugacucucacauaa

SEQ ID NO: 47729 - RNA, 21 nt, Artificial Sequence
  RPE65 RNA guide
acccagaaacugcuauugagc

SEQ ID NO: 47730 - RNA, 21 nt, Artificial Sequence
  RPE65 RNA guide
accccaccugaaaacaaaaga

SEQ ID NO: 47731 - RNA, 21 nt, Artificial Sequence
  RPE65 RNA guide
accccguaauuuccaggaaca

SEQ ID NO: 47732 - RNA, 21 nt, Artificial Sequence
  RPE65 RNA guide
accuaaacuuccuacugcuuu

SEQ ID NO: 47733 - RNA, 21 nt, Artificial Sequence
  RPE65 RNA guide
accuaaggacacaaacagaau

SEQ ID NO: 47734 - RNA, 21 nt, Artificial Sequence
  RPE65 RNA guide
accucccauuguuccuggaaa

SEQ ID NO: 47735 - RNA, 21 nt, Artificial Sequence
  RPE65 RNA guide
accucucaggucacagaaucu

SEQ ID NO: 47736 - RNA, 21 nt, Artificial Sequence
  RPE65 RNA guide
accugaaaacaaaagauucug

SEQ ID NO: 47737 - RNA, 21 nt, Artificial Sequence
  RPE65 RNA guide
accugagaggugaacuuaaag

SEQ ID NO: 47738 - RNA, 21 nt, Artificial Sequence
  RPE65 RNA guide
accugcuuaauggauuuguuu

SEQ ID NO: 47739 - RNA, 21 nt, Artificial Sequence
  RPE65 RNA guide
accuggcucaauagcaguuuc

SEQ ID NO: 47740 - RNA, 21 nt, Artificial Sequence
  RPE65 RNA guide
acgcaugucuuuuucucccuu

SEQ ID NO: 47741 - RNA, 21 nt, Artificial Sequence
  RPE65 RNA guide
acgggguuuuuacagagcugc

SEQ ID NO: 47742 - RNA, 21 nt, Artificial Sequence
  RPE65 RNA guide
acuaaucggguccaugaaccc

SEQ ID NO: 47743 - RNA, 21 nt, Artificial Sequence
  RPE65 RNA guide
acuagccaaaucacuaagaag

SEQ ID NO: 47744 - RNA, 21 nt, Artificial Sequence
  RPE65 RNA guide
acucaaucugaaucacaucua

SEQ ID NO: 47745 - RNA, 21 nt, Artificial Sequence
  RPE65 RNA guide
acucuugcuguuuuagaugug

SEQ ID NO: 47746 - RNA, 21 nt, Artificial Sequence
  RPE65 RNA guide
acugcuauugagccaggugua

SEQ ID NO: 47747 - RNA, 21 nt, Artificial Sequence
  RPE65 RNA guide
acuggacaaaugggacaccuc

SEQ ID NO: 47748 - RNA, 21 nt, Artificial Sequence
  RPE65 RNA guide
acuuaaacaaauccauuaagc

SEQ ID NO: 47749 - RNA, 21 nt, Artificial Sequence
  RPE65 RNA guide
acuuccuacugcuuuuccaau

SEQ ID NO: 47750 - RNA, 21 nt, Artificial Sequence
  RPE65 RNA guide
acuugagccccaucuucucug

SEQ ID NO: 47751 - RNA, 21 nt, Artificial Sequence
  RPE65 RNA guide
acuugugcuuaaaaaggcaag

SEQ ID NO: 47752 - RNA, 21 nt, Artificial Sequence
  RPE65 RNA guide
acuuuaaguucaccucucagg

SEQ ID NO: 47753 - RNA, 21 nt, Artificial Sequence
  RPE65 RNA guide
acuuucuguucugucuuccug

SEQ ID NO: 47754 - RNA, 21 nt, Artificial Sequence
  RPE65 RNA guide
agaaaaagacaugcguuuuuc

SEQ ID NO: 47755 - RNA, 21 nt, Artificial Sequence
  RPE65 RNA guide
agaaacugcuauugagccagg

SEQ ID NO: 47756 - RNA, 21 nt, Artificial Sequence
  RPE65 RNA guide
agaaaggacacuggacaaaug

SEQ ID NO: 47757 - RNA, 21 nt, Artificial Sequence
  RPE65 RNA guide
agaaaguaucucaaggcugcu

SEQ ID NO: 47758 - RNA, 21 nt, Artificial Sequence
  RPE65 RNA guide
agaacagaaaguaucucaagg

SEQ ID NO: 47759 - RNA, 21 nt, Artificial Sequence
  RPE65 RNA guide
agaacaggcaggcacuugugc

SEQ ID NO: 47760 - RNA, 21 nt, Artificial Sequence
  RPE65 RNA guide
agaagauggggcucaaguuuc

SEQ ID NO: 47761 - RNA, 21 nt, Artificial Sequence
  RPE65 RNA guide
agaaucuuuuguuuucaggug

SEQ ID NO: 47762 - RNA, 21 nt, Artificial Sequence
  RPE65 RNA guide
agaauggugacaggaagacag

SEQ ID NO: 47763 - RNA, 21 nt, Artificial Sequence
  RPE65 RNA guide
agacagaacagaaaguaucuc

SEQ ID NO: 47764 - RNA, 21 nt, Artificial Sequence
  RPE65 RNA guide
agacaugcguuuuucagacua

SEQ ID NO: 47765 - RNA, 21 nt, Artificial Sequence
  RPE65 RNA guide
agacuagccaaaucacuaaga

SEQ ID NO: 47766 - RNA, 21 nt, Artificial Sequence
  RPE65 RNA guide
agagaagauggggcucaaguu

SEQ ID NO: 47767 - RNA, 21 nt, Artificial Sequence
  RPE65 RNA guide
agagagaugauucuugccuuu

SEQ ID NO: 47768 - RNA, 21 nt, Artificial Sequence
  RPE65 RNA guide
agagaugauucuugccuuuuu

SEQ ID NO: 47769 - RNA, 21 nt, Artificial Sequence
  RPE65 RNA guide
agagccauuuccucccgccca

SEQ ID NO: 47770 - RNA, 21 nt, Artificial Sequence
  RPE65 RNA guide
agagcugcugcacucaaucug

SEQ ID NO: 47771 - RNA, 21 nt, Artificial Sequence
  RPE65 RNA guide
agaggugaacuuaaaguugac

SEQ ID NO: 47772 - RNA, 21 nt, Artificial Sequence
  RPE65 RNA guide
agauacuuucuguucugucuu

SEQ ID NO: 47773 - RNA, 21 nt, Artificial Sequence
  RPE65 RNA guide
agaugauucuugccuuuuuaa

SEQ ID NO: 47774 - RNA, 21 nt, Artificial Sequence
  RPE65 RNA guide
agaugugauucagauugagug

SEQ ID NO: 47775 - RNA, 21 nt, Artificial Sequence
  RPE65 RNA guide
agauuaccuaaacuuccuacu

SEQ ID NO: 47776 - RNA, 21 nt, Artificial Sequence
  RPE65 RNA guide
agauucugugaccugagaggu

SEQ ID NO: 47777 - RNA, 21 nt, Artificial Sequence
  RPE65 RNA guide
agauugagugcagcagcucug

SEQ ID NO: 47778 - RNA, 21 nt, Artificial Sequence
  RPE65 RNA guide
agcaaccugcuuaauggauuu

SEQ ID NO: 47779 - RNA, 21 nt, Artificial Sequence
  RPE65 RNA guide
agcacaagugccugccuguuc

SEQ ID NO: 47780 - RNA, 21 nt, Artificial Sequence
  RPE65 RNA guide
agcacaggcaaugacaaauaa

SEQ ID NO: 47781 - RNA, 21 nt, Artificial Sequence
  RPE65 RNA guide
agcagccuugagauacuuucu

SEQ ID NO: 47782 - RNA, 21 nt, Artificial Sequence
  RPE65 RNA guide
agcagcucuguaaaaaccccg

SEQ ID NO: 47783 - RNA, 21 nt, Artificial Sequence
  RPE65 RNA guide
agcagguugcuuuauuuucau

SEQ ID NO: 47784 - RNA, 21 nt, Artificial Sequence
  RPE65 RNA guide
agcaguaggaaguuuagguaa

SEQ ID NO: 47785 - RNA, 21 nt, Artificial Sequence
  RPE65 RNA guide
agcaguuucuggguuguggaa

SEQ ID NO: 47786 - RNA, 21 nt, Artificial Sequence
  RPE65 RNA guide
agccaaaucacuaagaagaca

SEQ ID NO: 47787 - RNA, 21 nt, Artificial Sequence
  RPE65 RNA guide
agccagguguaucagagccau

SEQ ID NO: 47788 - RNA, 21 nt, Artificial Sequence
  RPE65 RNA guide
agccauuuccucccgcccaca

SEQ ID NO: 47789 - RNA, 21 nt, Artificial Sequence
  RPE65 RNA guide
agccccaucuucucugcgaag

SEQ ID NO: 47790 - RNA, 21 nt, Artificial Sequence
  RPE65 RNA guide
agccuugagauacuuucuguu

SEQ ID NO: 47791 - RNA, 21 nt, Artificial Sequence
  RPE65 RNA guide
agcucuguaaaaaccccguaa

SEQ ID NO: 47792 - RNA, 21 nt, Artificial Sequence
  RPE65 RNA guide
agcugcugcacucaaucugaa

SEQ ID NO: 47793 - RNA, 21 nt, Artificial Sequence
  RPE65 RNA guide
aggaaauggcucugauacacc

SEQ ID NO: 47794 - RNA, 21 nt, Artificial Sequence
  RPE65 RNA guide
aggaacaaugggagguguccc

SEQ ID NO: 47795 - RNA, 21 nt, Artificial Sequence
  RPE65 RNA guide
aggaagacagaacagaaagua

SEQ ID NO: 47796 - RNA, 21 nt, Artificial Sequence
  RPE65 RNA guide
aggaaguuuagguaaucugaa

SEQ ID NO: 47797 - RNA, 21 nt, Artificial Sequence
  RPE65 RNA guide
aggacacaaacagaaugguga

SEQ ID NO: 47798 - RNA, 21 nt, Artificial Sequence
  RPE65 RNA guide
aggacacuggacaaaugggac

SEQ ID NO: 47799 - RNA, 21 nt, Artificial Sequence
  RPE65 RNA guide
aggaugaaaauaaagcaaccu

SEQ ID NO: 47800 - RNA, 21 nt, Artificial Sequence
  RPE65 RNA guide
aggcaagaaucaucucucuaa

SEQ ID NO: 47801 - RNA, 21 nt, Artificial Sequence
  RPE65 RNA guide
aggcacuugugcuuaaaaagg

SEQ ID NO: 47802 - RNA, 21 nt, Artificial Sequence
  RPE65 RNA guide
aggcaggcacuugugcuuaaa

SEQ ID NO: 47803 - RNA, 21 nt, Artificial Sequence
  RPE65 RNA guide
aggcugcuguuacuuaaacaa

SEQ ID NO: 47804 - RNA, 21 nt, Artificial Sequence
  RPE65 RNA guide
agggagaaaaagacaugcguu

SEQ ID NO: 47805 - RNA, 21 nt, Artificial Sequence
  RPE65 RNA guide
agguaaucugaacaucaaaac

SEQ ID NO: 47806 - RNA, 21 nt, Artificial Sequence
  RPE65 RNA guide
aggucacagaaucuuuuguuu

SEQ ID NO: 47807 - RNA, 21 nt, Artificial Sequence
  RPE65 RNA guide
aggugaacuuaaaguugacaa

SEQ ID NO: 47808 - RNA, 21 nt, Artificial Sequence
  RPE65 RNA guide
aggugggguucauggacccga

SEQ ID NO: 47809 - RNA, 21 nt, Artificial Sequence
  RPE65 RNA guide
agguguaucagagccauuucc

SEQ ID NO: 47810 - RNA, 21 nt, Artificial Sequence
  RPE65 RNA guide
aggugucccauuuguccagug

SEQ ID NO: 47811 - RNA, 21 nt, Artificial Sequence
  RPE65 RNA guide
agguugcuuuauuuucauccu

SEQ ID NO: 47812 - RNA, 21 nt, Artificial Sequence
  RPE65 RNA guide
aguaacagcagccuugagaua

SEQ ID NO: 47813 - RNA, 21 nt, Artificial Sequence
  RPE65 RNA guide
aguaggaaguuuagguaaucu

SEQ ID NO: 47814 - RNA, 21 nt, Artificial Sequence
  RPE65 RNA guide
aguaucucaaggcugcuguua

SEQ ID NO: 47815 - RNA, 21 nt, Artificial Sequence
  RPE65 RNA guide
agucaaacaugagcacaggca

SEQ ID NO: 47816 - RNA, 21 nt, Artificial Sequence
  RPE65 RNA guide
agucugaaaaacgcaugucuu

SEQ ID NO: 47817 - RNA, 21 nt, Artificial Sequence
  RPE65 RNA guide
agugauuuggcuagucugaaa

SEQ ID NO: 47818 - RNA, 21 nt, Artificial Sequence
  RPE65 RNA guide
agugcagcagcucuguaaaaa

SEQ ID NO: 47819 - RNA, 21 nt, Artificial Sequence
  RPE65 RNA guide
agugccugccuguucuuuauu

SEQ ID NO: 47820 - RNA, 21 nt, Artificial Sequence
  RPE65 RNA guide
aguucaccucucaggucacag

SEQ ID NO: 47821 - RNA, 21 nt, Artificial Sequence
  RPE65 RNA guide
aguuucuggguuguggaauaa

SEQ ID NO: 47822 - RNA, 21 nt, Artificial Sequence
  RPE65 RNA guide
auaaaaagucaaacaugagca

SEQ ID NO: 47823 - RNA, 21 nt, Artificial Sequence
  RPE65 RNA guide
auaaagaacaggcaggcacuu

SEQ ID NO: 47824 - RNA, 21 nt, Artificial Sequence
  RPE65 RNA guide
auaaagcaaccugcuuaaugg

SEQ ID NO: 47825 - RNA, 21 nt, Artificial Sequence
  RPE65 RNA guide
auaacucuugcuguuuuagau

SEQ ID NO: 47826 - RNA, 21 nt, Artificial Sequence
  RPE65 RNA guide
auacaccuggcucaauagcag

SEQ ID NO: 47827 - RNA, 21 nt, Artificial Sequence
  RPE65 RNA guide
auacuuucuguucugucuucc

SEQ ID NO: 47828 - RNA, 21 nt, Artificial Sequence
  RPE65 RNA guide
auagcaguuucuggguugugg

SEQ ID NO: 47829 - RNA, 21 nt, Artificial Sequence
  RPE65 RNA guide
aucacaucuaaaacagcaaga

SEQ ID NO: 47830 - RNA, 21 nt, Artificial Sequence
  RPE65 RNA guide
aucagagccauuuccucccgc

SEQ ID NO: 47831 - RNA, 21 nt, Artificial Sequence
  RPE65 RNA guide
auccauuaagcagguugcuuu

SEQ ID NO: 47832 - RNA, 21 nt, Artificial Sequence
  RPE65 RNA guide
auccugugugggcgggaggaa

SEQ ID NO: 47833 - RNA, 21 nt, Artificial Sequence
  RPE65 RNA guide
aucggguccaugaaccccacc

SEQ ID NO: 47834 - RNA, 21 nt, Artificial Sequence
  RPE65 RNA guide
aucuaaaacagcaagaguuau

SEQ ID NO: 47835 - RNA, 21 nt, Artificial Sequence
  RPE65 RNA guide
aucucaaggcugcuguuacuu

SEQ ID NO: 47836 - RNA, 21 nt, Artificial Sequence
  RPE65 RNA guide
aucugaaucacaucuaaaaca

SEQ ID NO: 47837 - RNA, 21 nt, Artificial Sequence
  RPE65 RNA guide
aucuucucugcgaagggagaa

SEQ ID NO: 47838 - RNA, 21 nt, Artificial Sequence
  RPE65 RNA guide
aucuuuuguuuucaggugggg

SEQ ID NO: 47839 - RNA, 21 nt, Artificial Sequence
  RPE65 RNA guide
augaaccccaccugaaaacaa

SEQ ID NO: 47840 - RNA, 21 nt, Artificial Sequence
  RPE65 RNA guide
augagcacaggcaaugacaaa

SEQ ID NO: 47841 - RNA, 21 nt, Artificial Sequence
  RPE65 RNA guide
augauucuugccuuuuuaagc

SEQ ID NO: 47842 - RNA, 21 nt, Artificial Sequence
  RPE65 RNA guide
augauugaaaacuaaucgggu

SEQ ID NO: 47843 - RNA, 21 nt, Artificial Sequence
  RPE65 RNA guide
augcguuuuucagacuagcca

SEQ ID NO: 47844 - RNA, 21 nt, Artificial Sequence
  RPE65 RNA guide
auggacccgauuaguuuucaa

SEQ ID NO: 47845 - RNA, 21 nt, Artificial Sequence
  RPE65 RNA guide
auggauuuguuuaaguaacag

SEQ ID NO: 47846 - RNA, 21 nt, Artificial Sequence
  RPE65 RNA guide
auggcucugauacaccuggcu

SEQ ID NO: 47847 - RNA, 21 nt, Artificial Sequence
  RPE65 RNA guide
augggacaccucccauuguuc

SEQ ID NO: 47848 - RNA, 21 nt, Artificial Sequence
  RPE65 RNA guide
augggaggugucccauuuguc

SEQ ID NO: 47849 - RNA, 21 nt, Artificial Sequence
  RPE65 RNA guide
auggugacaggaagacagaac

SEQ ID NO: 47850 - RNA, 21 nt, Artificial Sequence
  RPE65 RNA guide
auguaauuggaaaagcaguag

SEQ ID NO: 47851 - RNA, 21 nt, Artificial Sequence
  RPE65 RNA guide
augucuuuuucucccuucgca

SEQ ID NO: 47852 - RNA, 21 nt, Artificial Sequence
  RPE65 RNA guide
augugagagucaaaaauguaa

SEQ ID NO: 47853 - RNA, 21 nt, Artificial Sequence
  RPE65 RNA guide
augugauucagauugagugca

SEQ ID NO: 47854 - RNA, 21 nt, Artificial Sequence
  RPE65 RNA guide
auguucagauuaccuaaacuu

SEQ ID NO: 47855 - RNA, 21 nt, Artificial Sequence
  RPE65 RNA guide
auuaccuaaacuuccuacugc

SEQ ID NO: 47856 - RNA, 21 nt, Artificial Sequence
  RPE65 RNA guide
auuacgggguuuuuacagagc

SEQ ID NO: 47857 - RNA, 21 nt, Artificial Sequence
  RPE65 RNA guide
auuauuugucauugccugugc

SEQ ID NO: 47858 - RNA, 21 nt, Artificial Sequence
  RPE65 RNA guide
auucagauugagugcagcagc

SEQ ID NO: 47859 - RNA, 21 nt, Artificial Sequence
  RPE65 RNA guide
auuccacaacccagaaacugc

SEQ ID NO: 47860 - RNA, 21 nt, Artificial Sequence
  RPE65 RNA guide
auucugugaccugagagguga

SEQ ID NO: 47861 - RNA, 21 nt, Artificial Sequence
  RPE65 RNA guide
auucuugccuuuuuaagcaca

SEQ ID NO: 47862 - RNA, 21 nt, Artificial Sequence
  RPE65 RNA guide
auugaaaacuaaucgggucca

SEQ ID NO: 47863 - RNA, 21 nt, Artificial Sequence
  RPE65 RNA guide
auugagccagguguaucagag

SEQ ID NO: 47864 - RNA, 21 nt, Artificial Sequence
  RPE65 RNA guide
auugagugcagcagcucugua

SEQ ID NO: 47865 - RNA, 21 nt, Artificial Sequence
  RPE65 RNA guide
auugccugugcucauguuuga

SEQ ID NO: 47866 - RNA, 21 nt, Artificial Sequence
  RPE65 RNA guide
auuggaaaagcaguaggaagu

SEQ ID NO: 47867 - RNA, 21 nt, Artificial Sequence
  RPE65 RNA guide
auuguuccuggaaauuacggg

SEQ ID NO: 47868 - RNA, 21 nt, Artificial Sequence
  RPE65 RNA guide
auuuccaggaacaaugggagg

SEQ ID NO: 47869 - RNA, 21 nt, Artificial Sequence
  RPE65 RNA guide
auuuccucccgcccacacagg

SEQ ID NO: 47870 - RNA, 21 nt, Artificial Sequence
  RPE65 RNA guide
auuuggcuagucugaaaaacg

SEQ ID NO: 47871 - RNA, 21 nt, Artificial Sequence
  RPE65 RNA guide
auuugucauugccugugcuca

SEQ ID NO: 47872 - RNA, 21 nt, Artificial Sequence
  RPE65 RNA guide
auuuguuuaaguaacagcagc

SEQ ID NO: 47873 - RNA, 21 nt, Artificial Sequence
  RPE65 RNA guide
auuuuagagagaugauucuug

SEQ ID NO: 47874 - RNA, 21 nt, Artificial Sequence
  RPE65 RNA guide
auuuucauccugugugggcgg

SEQ ID NO: 47875 - RNA, 21 nt, Artificial Sequence
  RPE65 RNA guide
auuuugucaacuuuaaguuca

SEQ ID NO: 47876 - RNA, 21 nt, Artificial Sequence
  RPE65 RNA guide
auuuuugacucucacauaacu

SEQ ID NO: 47877 - RNA, 21 nt, Artificial Sequence
  RPE65 RNA guide
caaaagauucugugaccugag

SEQ ID NO: 47878 - RNA, 21 nt, Artificial Sequence
  RPE65 RNA guide
caaacagaauggugacaggaa

SEQ ID NO: 47879 - RNA, 21 nt, Artificial Sequence
  RPE65 RNA guide
caaacaugagcacaggcaaug

SEQ ID NO: 47880 - RNA, 21 nt, Artificial Sequence
  RPE65 RNA guide
caaauccauuaagcagguugc

SEQ ID NO: 47881 - RNA, 21 nt, Artificial Sequence
  RPE65 RNA guide
caaaugggacaccucccauug

SEQ ID NO: 47882 - RNA, 21 nt, Artificial Sequence
  RPE65 RNA guide
caacccagaaacugcuauuga

SEQ ID NO: 47883 - RNA, 21 nt, Artificial Sequence
  RPE65 RNA guide
caaccugcuuaauggauuugu

SEQ ID NO: 47884 - RNA, 21 nt, Artificial Sequence
  RPE65 RNA guide
caacuuuaaguucaccucuca

SEQ ID NO: 47885 - RNA, 21 nt, Artificial Sequence
  RPE65 RNA guide
caaggcugcuguuacuuaaac

SEQ ID NO: 47886 - RNA, 21 nt, Artificial Sequence
  RPE65 RNA guide
caagugccugccuguucuuua

SEQ ID NO: 47887 - RNA, 21 nt, Artificial Sequence
  RPE65 RNA guide
caauagcaguuucuggguugu

SEQ ID NO: 47888 - RNA, 21 nt, Artificial Sequence
  RPE65 RNA guide
caaucugaaucacaucuaaaa

SEQ ID NO: 47889 - RNA, 21 nt, Artificial Sequence
  RPE65 RNA guide
caaugggaggugucccauuug

SEQ ID NO: 47890 - RNA, 21 nt, Artificial Sequence
  RPE65 RNA guide
cacaaacagaauggugacagg

SEQ ID NO: 47891 - RNA, 21 nt, Artificial Sequence
  RPE65 RNA guide
cacaacccagaaacugcuauu

SEQ ID NO: 47892 - RNA, 21 nt, Artificial Sequence
  RPE65 RNA guide
cacaagugccugccuguucuu

SEQ ID NO: 47893 - RNA, 21 nt, Artificial Sequence
  RPE65 RNA guide
cacacaggaugaaaauaaagc

SEQ ID NO: 47894 - RNA, 21 nt, Artificial Sequence
  RPE65 RNA guide
cacagaaucuuuuguuuucag

SEQ ID NO: 47895 - RNA, 21 nt, Artificial Sequence
  RPE65 RNA guide
cacaggaugaaaauaaagcaa

SEQ ID NO: 47896 - RNA, 21 nt, Artificial Sequence
  RPE65 RNA guide
cacaggcaaugacaaauaauu

SEQ ID NO: 47897 - RNA, 21 nt, Artificial Sequence
  RPE65 RNA guide
caccucccauuguuccuggaa

SEQ ID NO: 47898 - RNA, 21 nt, Artificial Sequence
  RPE65 RNA guide
caccucucaggucacagaauc

SEQ ID NO: 47899 - RNA, 21 nt, Artificial Sequence
  RPE65 RNA guide
caccugaaaacaaaagauucu

SEQ ID NO: 47900 - RNA, 21 nt, Artificial Sequence
  RPE65 RNA guide
caccuggcucaauagcaguuu

SEQ ID NO: 47901 - RNA, 21 nt, Artificial Sequence
  RPE65 RNA guide
cacucaaucugaaucacaucu

SEQ ID NO: 47902 - RNA, 21 nt, Artificial Sequence
  RPE65 RNA guide
cacuggacaaaugggacaccu

SEQ ID NO: 47903 - RNA, 21 nt, Artificial Sequence
  RPE65 RNA guide
cacuugugcuuaaaaaggcaa

SEQ ID NO: 47904 - RNA, 21 nt, Artificial Sequence
  RPE65 RNA guide
cagaaacugcuauugagccag

SEQ ID NO: 47905 - RNA, 21 nt, Artificial Sequence
  RPE65 RNA guide
cagaaaguaucucaaggcugc

SEQ ID NO: 47906 - RNA, 21 nt, Artificial Sequence
  RPE65 RNA guide
cagaacagaaaguaucucaag

SEQ ID NO: 47907 - RNA, 21 nt, Artificial Sequence
  RPE65 RNA guide
cagaaucuuuuguuuucaggu

SEQ ID NO: 47908 - RNA, 21 nt, Artificial Sequence
  RPE65 RNA guide
cagaauggugacaggaagaca

SEQ ID NO: 47909 - RNA, 21 nt, Artificial Sequence
  RPE65 RNA guide
cagacuagccaaaucacuaag

SEQ ID NO: 47910 - RNA, 21 nt, Artificial Sequence
  RPE65 RNA guide
cagagaagauggggcucaagu

SEQ ID NO: 47911 - RNA, 21 nt, Artificial Sequence
  RPE65 RNA guide
cagagccauuuccucccgccc

SEQ ID NO: 47912 - RNA, 21 nt, Artificial Sequence
  RPE65 RNA guide
cagagcugcugcacucaaucu

SEQ ID NO: 47913 - RNA, 21 nt, Artificial Sequence
  RPE65 RNA guide
cagauuaccuaaacuuccuac

SEQ ID NO: 47914 - RNA, 21 nt, Artificial Sequence
  RPE65 RNA guide
cagauugagugcagcagcucu

SEQ ID NO: 47915 - RNA, 21 nt, Artificial Sequence
  RPE65 RNA guide
cagcagccuugagauacuuuc

SEQ ID NO: 47916 - RNA, 21 nt, Artificial Sequence
  RPE65 RNA guide
cagcagcucuguaaaaacccc

SEQ ID NO: 47917 - RNA, 21 nt, Artificial Sequence
  RPE65 RNA guide
cagccuugagauacuuucugu

SEQ ID NO: 47918 - RNA, 21 nt, Artificial Sequence
  RPE65 RNA guide
cagcucuguaaaaaccccgua

SEQ ID NO: 47919 - RNA, 21 nt, Artificial Sequence
  RPE65 RNA guide
caggaacaaugggaggugucc

SEQ ID NO: 47920 - RNA, 21 nt, Artificial Sequence
  RPE65 RNA guide
caggaagacagaacagaaagu

SEQ ID NO: 47921 - RNA, 21 nt, Artificial Sequence
  RPE65 RNA guide
caggaugaaaauaaagcaacc

SEQ ID NO: 47922 - RNA, 21 nt, Artificial Sequence
  RPE65 RNA guide
caggcaaugacaaauaauuuu

SEQ ID NO: 47923 - RNA, 21 nt, Artificial Sequence
  RPE65 RNA guide
caggcacuugugcuuaaaaag

SEQ ID NO: 47924 - RNA, 21 nt, Artificial Sequence
  RPE65 RNA guide
caggcaggcacuugugcuuaa

SEQ ID NO: 47925 - RNA, 21 nt, Artificial Sequence
  RPE65 RNA guide
caggucacagaaucuuuuguu

SEQ ID NO: 47926 - RNA, 21 nt, Artificial Sequence
  RPE65 RNA guide
caggugggguucauggacccg

SEQ ID NO: 47927 - RNA, 21 nt, Artificial Sequence
  RPE65 RNA guide
cagguguaucagagccauuuc

SEQ ID NO: 47928 - RNA, 21 nt, Artificial Sequence
  RPE65 RNA guide
cagguugcuuuauuuucaucc

SEQ ID NO: 47929 - RNA, 21 nt, Artificial Sequence
  RPE65 RNA guide
caguaggaaguuuagguaauc

SEQ ID NO: 47930 - RNA, 21 nt, Artificial Sequence
  RPE65 RNA guide
caguuucuggguuguggaaua

SEQ ID NO: 47931 - RNA, 21 nt, Artificial Sequence
  RPE65 RNA guide
cauaguuuugauguucagauu

SEQ ID NO: 47932 - RNA, 21 nt, Artificial Sequence
  RPE65 RNA guide
cauccugugugggcgggagga

SEQ ID NO: 47933 - RNA, 21 nt, Artificial Sequence
  RPE65 RNA guide
caucuucucugcgaagggaga

SEQ ID NO: 47934 - RNA, 21 nt, Artificial Sequence
  RPE65 RNA guide
caugaaccccaccugaaaaca

SEQ ID NO: 47935 - RNA, 21 nt, Artificial Sequence
  RPE65 RNA guide
caugagcacaggcaaugacaa

SEQ ID NO: 47936 - RNA, 21 nt, Artificial Sequence
  RPE65 RNA guide
caugcguuuuucagacuagcc

SEQ ID NO: 47937 - RNA, 21 nt, Artificial Sequence
  RPE65 RNA guide
cauggacccgauuaguuuuca

SEQ ID NO: 47938 - RNA, 21 nt, Artificial Sequence
  RPE65 RNA guide
caugucuuuuucucccuucgc

SEQ ID NO: 47939 - RNA, 21 nt, Artificial Sequence
  RPE65 RNA guide
cauuaagcagguugcuuuauu

SEQ ID NO: 47940 - RNA, 21 nt, Artificial Sequence
  RPE65 RNA guide
cauugccugugcucauguuug

SEQ ID NO: 47941 - RNA, 21 nt, Artificial Sequence
  RPE65 RNA guide
cauuguuccuggaaauuacgg

SEQ ID NO: 47942 - RNA, 21 nt, Artificial Sequence
  RPE65 RNA guide
cauuuccucccgcccacacag

SEQ ID NO: 47943 - RNA, 21 nt, Artificial Sequence
  RPE65 RNA guide
ccacaacccagaaacugcuau

SEQ ID NO: 47944 - RNA, 21 nt, Artificial Sequence
  RPE65 RNA guide
ccacacaggaugaaaauaaag

SEQ ID NO: 47945 - RNA, 21 nt, Artificial Sequence
  RPE65 RNA guide
ccaccugaaaacaaaagauuc

SEQ ID NO: 47946 - RNA, 21 nt, Artificial Sequence
  RPE65 RNA guide
ccagaaacugcuauugagcca

SEQ ID NO: 47947 - RNA, 21 nt, Artificial Sequence
  RPE65 RNA guide
ccaggaacaaugggagguguc

SEQ ID NO: 47948 - RNA, 21 nt, Artificial Sequence
  RPE65 RNA guide
ccagguguaucagagccauuu

SEQ ID NO: 47949 - RNA, 21 nt, Artificial Sequence
  RPE65 RNA guide
ccaucuucucugcgaagggag

SEQ ID NO: 47950 - RNA, 21 nt, Artificial Sequence
  RPE65 RNA guide
ccaugaaccccaccugaaaac

SEQ ID NO: 47951 - RNA, 21 nt, Artificial Sequence
  RPE65 RNA guide
ccauuaagcagguugcuuuau

SEQ ID NO: 47952 - RNA, 21 nt, Artificial Sequence
  RPE65 RNA guide
ccauuguuccuggaaauuacg

SEQ ID NO: 47953 - RNA, 21 nt, Artificial Sequence
  RPE65 RNA guide
ccauuuccucccgcccacaca

SEQ ID NO: 47954 - RNA, 21 nt, Artificial Sequence
  RPE65 RNA guide
ccauuuguccaguguccuuuc

SEQ ID NO: 47955 - RNA, 21 nt, Artificial Sequence
  RPE65 RNA guide
cccacacaggaugaaaauaaa

SEQ ID NO: 47956 - RNA, 21 nt, Artificial Sequence
  RPE65 RNA guide
cccaccugaaaacaaaagauu

SEQ ID NO: 47957 - RNA, 21 nt, Artificial Sequence
  RPE65 RNA guide
cccagaaacugcuauugagcc

SEQ ID NO: 47958 - RNA, 21 nt, Artificial Sequence
  RPE65 RNA guide
cccaucuucucugcgaaggga

SEQ ID NO: 47959 - RNA, 21 nt, Artificial Sequence
  RPE65 RNA guide
cccauuguuccuggaaauuac

SEQ ID NO: 47960 - RNA, 21 nt, Artificial Sequence
  RPE65 RNA guide
cccauuuguccaguguccuuu

SEQ ID NO: 47961 - RNA, 21 nt, Artificial Sequence
  RPE65 RNA guide
ccccaccugaaaacaaaagau

SEQ ID NO: 47962 - RNA, 21 nt, Artificial Sequence
  RPE65 RNA guide
ccccaucuucucugcgaaggg

SEQ ID NO: 47963 - RNA, 21 nt, Artificial Sequence
  RPE65 RNA guide
ccccguaauuuccaggaacaa

SEQ ID NO: 47964 - RNA, 21 nt, Artificial Sequence
  RPE65 RNA guide
cccgauuaguuuucaaucauu

SEQ ID NO: 47965 - RNA, 21 nt, Artificial Sequence
  RPE65 RNA guide
cccgcccacacaggaugaaaa

SEQ ID NO: 47966 - RNA, 21 nt, Artificial Sequence
  RPE65 RNA guide
cccguaauuuccaggaacaau

SEQ ID NO: 47967 - RNA, 21 nt, Artificial Sequence
  RPE65 RNA guide
cccuucgcagagaagaugggg

SEQ ID NO: 47968 - RNA, 21 nt, Artificial Sequence
  RPE65 RNA guide
ccgcccacacaggaugaaaau

SEQ ID NO: 47969 - RNA, 21 nt, Artificial Sequence
  RPE65 RNA guide
ccguaauuuccaggaacaaug

SEQ ID NO: 47970 - RNA, 21 nt, Artificial Sequence
  RPE65 RNA guide
ccuaaacuuccuacugcuuuu

SEQ ID NO: 47971 - RNA, 21 nt, Artificial Sequence
  RPE65 RNA guide
ccuaaggacacaaacagaaug

SEQ ID NO: 47972 - RNA, 21 nt, Artificial Sequence
  RPE65 RNA guide
ccuacugcuuuuccaauuaca

SEQ ID NO: 47973 - RNA, 21 nt, Artificial Sequence
  RPE65 RNA guide
ccucccauuguuccuggaaau

SEQ ID NO: 47974 - RNA, 21 nt, Artificial Sequence
  RPE65 RNA guide
ccucccgcccacacaggauga

SEQ ID NO: 47975 - RNA, 21 nt, Artificial Sequence
  RPE65 RNA guide
ccucucaggucacagaaucuu

SEQ ID NO: 47976 - RNA, 21 nt, Artificial Sequence
  RPE65 RNA guide
ccugaaaacaaaagauucugu

SEQ ID NO: 47977 - RNA, 21 nt, Artificial Sequence
  RPE65 RNA guide
ccugagaggugaacuuaaagu

SEQ ID NO: 47978 - RNA, 21 nt, Artificial Sequence
  RPE65 RNA guide
ccugccuguucuuuauuccac

SEQ ID NO: 47979 - RNA, 21 nt, Artificial Sequence
  RPE65 RNA guide
ccugcuuaauggauuuguuua

SEQ ID NO: 47980 - RNA, 21 nt, Artificial Sequence
  RPE65 RNA guide
ccuggaaauuacgggguuuuu

SEQ ID NO: 47981 - RNA, 21 nt, Artificial Sequence
  RPE65 RNA guide
ccuggcucaauagcaguuucu

SEQ ID NO: 47982 - RNA, 21 nt, Artificial Sequence
  RPE65 RNA guide
ccuggggaaacuugagcccca

SEQ ID NO: 47983 - RNA, 21 nt, Artificial Sequence
  RPE65 RNA guide
ccugucaccauucuguuugug

SEQ ID NO: 47984 - RNA, 21 nt, Artificial Sequence
  RPE65 RNA guide
ccugugcucauguuugacuuu

SEQ ID NO: 47985 - RNA, 21 nt, Artificial Sequence
  RPE65 RNA guide
ccugugugggcgggaggaaau

SEQ ID NO: 47986 - RNA, 21 nt, Artificial Sequence
  RPE65 RNA guide
ccuguucuuuauuccacaacc

SEQ ID NO: 47987 - RNA, 21 nt, Artificial Sequence
  RPE65 RNA guide
ccuucgcagagaagauggggc

SEQ ID NO: 47988 - RNA, 21 nt, Artificial Sequence
  RPE65 RNA guide
ccuugagauacuuucuguucu

SEQ ID NO: 47989 - RNA, 21 nt, Artificial Sequence
  RPE65 RNA guide
ccuuuuuaagcacaagugccu

SEQ ID NO: 47990 - RNA, 21 nt, Artificial Sequence
  RPE65 RNA guide
cgaagggagaaaaagacaugc

SEQ ID NO: 47991 - RNA, 21 nt, Artificial Sequence
  RPE65 RNA guide
cgcagagaagauggggcucaa

SEQ ID NO: 47992 - RNA, 21 nt, Artificial Sequence
  RPE65 RNA guide
cgcaugucuuuuucucccuuc

SEQ ID NO: 47993 - RNA, 21 nt, Artificial Sequence
  RPE65 RNA guide
cgcccacacaggaugaaaaua

SEQ ID NO: 47994 - RNA, 21 nt, Artificial Sequence
  RPE65 RNA guide
cgggaggaaauggcucugaua

SEQ ID NO: 47995 - RNA, 21 nt, Artificial Sequence
  RPE65 RNA guide
cgggguuuuuacagagcugcu

SEQ ID NO: 47996 - RNA, 21 nt, Artificial Sequence
  RPE65 RNA guide
cggguccaugaaccccaccug

SEQ ID NO: 47997 - RNA, 21 nt, Artificial Sequence
  RPE65 RNA guide
cguaauuuccaggaacaaugg

SEQ ID NO: 47998 - RNA, 21 nt, Artificial Sequence
  RPE65 RNA guide
cguuuuucagacuagccaaau

SEQ ID NO: 47999 - RNA, 21 nt, Artificial Sequence
  RPE65 RNA guide
cuaaaauuauuugucauugcc

SEQ ID NO: 48000 - RNA, 21 nt, Artificial Sequence
  RPE65 RNA guide
cuaaacuuccuacugcuuuuc

SEQ ID NO: 48001 - RNA, 21 nt, Artificial Sequence
  RPE65 RNA guide
cuaaggacacaaacagaaugg

SEQ ID NO: 48002 - RNA, 21 nt, Artificial Sequence
  RPE65 RNA guide
cuaaucggguccaugaacccc

SEQ ID NO: 48003 - RNA, 21 nt, Artificial Sequence
  RPE65 RNA guide
cuagccaaaucacuaagaaga

SEQ ID NO: 48004 - RNA, 21 nt, Artificial Sequence
  RPE65 RNA guide
cuagucugaaaaacgcauguc

SEQ ID NO: 48005 - RNA, 21 nt, Artificial Sequence
  RPE65 RNA guide
cuauugagccagguguaucag

SEQ ID NO: 48006 - RNA, 21 nt, Artificial Sequence
  RPE65 RNA guide
cucaaggcugcuguuacuuaa

SEQ ID NO: 48007 - RNA, 21 nt, Artificial Sequence
  RPE65 RNA guide
cucaauagcaguuucuggguu

SEQ ID NO: 48008 - RNA, 21 nt, Artificial Sequence
  RPE65 RNA guide
cucaaucugaaucacaucuaa

SEQ ID NO: 48009 - RNA, 21 nt, Artificial Sequence
  RPE65 RNA guide
cucaggucacagaaucuuuug

SEQ ID NO: 48010 - RNA, 21 nt, Artificial Sequence
  RPE65 RNA guide
cucccauuguuccuggaaauu

SEQ ID NO: 48011 - RNA, 21 nt, Artificial Sequence
  RPE65 RNA guide
cucccgcccacacaggaugaa

SEQ ID NO: 48012 - RNA, 21 nt, Artificial Sequence
  RPE65 RNA guide
cucccuucgcagagaagaugg

SEQ ID NO: 48013 - RNA, 21 nt, Artificial Sequence
  RPE65 RNA guide
cucuaaaauuauuugucauug

SEQ ID NO: 48014 - RNA, 21 nt, Artificial Sequence
  RPE65 RNA guide
cucucaggucacagaaucuuu

SEQ ID NO: 48015 - RNA, 21 nt, Artificial Sequence
  RPE65 RNA guide
cucucuaaaauuauuugucau

SEQ ID NO: 48016 - RNA, 21 nt, Artificial Sequence
  RPE65 RNA guide
cucugauacaccuggcucaau

SEQ ID NO: 48017 - RNA, 21 nt, Artificial Sequence
  RPE65 RNA guide
cucugcgaagggagaaaaaga

SEQ ID NO: 48018 - RNA, 21 nt, Artificial Sequence
  RPE65 RNA guide
cucuguaaaaaccccguaauu

SEQ ID NO: 48019 - RNA, 21 nt, Artificial Sequence
  RPE65 RNA guide
cucuugcuguuuuagauguga

SEQ ID NO: 48020 - RNA, 21 nt, Artificial Sequence
  RPE65 RNA guide
cugaaaaacgcaugucuuuuu

SEQ ID NO: 48021 - RNA, 21 nt, Artificial Sequence
  RPE65 RNA guide
cugaaaacaaaagauucugug

SEQ ID NO: 48022 - RNA, 21 nt, Artificial Sequence
  RPE65 RNA guide
cugaaucacaucuaaaacagc

SEQ ID NO: 48023 - RNA, 21 nt, Artificial Sequence
  RPE65 RNA guide
cugagaggugaacuuaaaguu

SEQ ID NO: 48024 - RNA, 21 nt, Artificial Sequence
  RPE65 RNA guide
cugauacaccuggcucaauag

SEQ ID NO: 48025 - RNA, 21 nt, Artificial Sequence
  RPE65 RNA guide
cugcacucaaucugaaucaca

SEQ ID NO: 48026 - RNA, 21 nt, Artificial Sequence
  RPE65 RNA guide
cugccuguucuuuauuccaca

SEQ ID NO: 48027 - RNA, 21 nt, Artificial Sequence
  RPE65 RNA guide
cugcgaagggagaaaaagaca

SEQ ID NO: 48028 - RNA, 21 nt, Artificial Sequence
  RPE65 RNA guide
cugcuauugagccagguguau

SEQ ID NO: 48029 - RNA, 21 nt, Artificial Sequence
  RPE65 RNA guide
cugcugcacucaaucugaauc

SEQ ID NO: 48030 - RNA, 21 nt, Artificial Sequence
  RPE65 RNA guide
cugcuguuacuuaaacaaauc

SEQ ID NO: 48031 - RNA, 21 nt, Artificial Sequence
  RPE65 RNA guide
cugcuuuuccaauuacauuuu

SEQ ID NO: 48032 - RNA, 21 nt, Artificial Sequence
  RPE65 RNA guide
cuggaaauuacgggguuuuua

SEQ ID NO: 48033 - RNA, 21 nt, Artificial Sequence
  RPE65 RNA guide
cuggacaaaugggacaccucc

SEQ ID NO: 48034 - RNA, 21 nt, Artificial Sequence
  RPE65 RNA guide
cuggcucaauagcaguuucug

SEQ ID NO: 48035 - RNA, 21 nt, Artificial Sequence
  RPE65 RNA guide
cuggggaaacuugagccccau

SEQ ID NO: 48036 - RNA, 21 nt, Artificial Sequence
  RPE65 RNA guide
cuggguuguggaauaaagaac

SEQ ID NO: 48037 - RNA, 21 nt, Artificial Sequence
  RPE65 RNA guide
cuguaaaaaccccguaauuuc

SEQ ID NO: 48038 - RNA, 21 nt, Artificial Sequence
  RPE65 RNA guide
cugucaccauucuguuugugu

SEQ ID NO: 48039 - RNA, 21 nt, Artificial Sequence
  RPE65 RNA guide
cugucuuccugucaccauucu

SEQ ID NO: 48040 - RNA, 21 nt, Artificial Sequence
  RPE65 RNA guide
cugugaccugagaggugaacu

SEQ ID NO: 48041 - RNA, 21 nt, Artificial Sequence
  RPE65 RNA guide
cugugcucauguuugacuuuu

SEQ ID NO: 48042 - RNA, 21 nt, Artificial Sequence
  RPE65 RNA guide
cugugugggcgggaggaaaug

SEQ ID NO: 48043 - RNA, 21 nt, Artificial Sequence
  RPE65 RNA guide
cuguucugucuuccugucacc

SEQ ID NO: 48044 - RNA, 21 nt, Artificial Sequence
  RPE65 RNA guide
cuguucuuuauuccacaaccc

SEQ ID NO: 48045 - RNA, 21 nt, Artificial Sequence
  RPE65 RNA guide
cuguugucuucuuagugauuu

SEQ ID NO: 48046 - RNA, 21 nt, Artificial Sequence
  RPE65 RNA guide
cuguuuuagaugugauucaga

SEQ ID NO: 48047 - RNA, 21 nt, Artificial Sequence
  RPE65 RNA guide
cuuaaaaaggcaagaaucauc

SEQ ID NO: 48048 - RNA, 21 nt, Artificial Sequence
  RPE65 RNA guide
cuuaaacaaauccauuaagca

SEQ ID NO: 48049 - RNA, 21 nt, Artificial Sequence
  RPE65 RNA guide
cuuagugauuuggcuagucug

SEQ ID NO: 48050 - RNA, 21 nt, Artificial Sequence
  RPE65 RNA guide
cuuccuacugcuuuuccaauu

SEQ ID NO: 48051 - RNA, 21 nt, Artificial Sequence
  RPE65 RNA guide
cuuccugucaccauucuguuu

SEQ ID NO: 48052 - RNA, 21 nt, Artificial Sequence
  RPE65 RNA guide
cuucgcagagaagauggggcu

SEQ ID NO: 48053 - RNA, 21 nt, Artificial Sequence
  RPE65 RNA guide
cuucucugcgaagggagaaaa

SEQ ID NO: 48054 - RNA, 21 nt, Artificial Sequence
  RPE65 RNA guide
cuucuuagugauuuggcuagu

SEQ ID NO: 48055 - RNA, 21 nt, Artificial Sequence
  RPE65 RNA guide
cuugagauacuuucuguucug

SEQ ID NO: 48056 - RNA, 21 nt, Artificial Sequence
  RPE65 RNA guide
cuugagccccaucuucucugc

SEQ ID NO: 48057 - RNA, 21 nt, Artificial Sequence
  RPE65 RNA guide
cuugccuuuuuaagcacaagu

SEQ ID NO: 48058 - RNA, 21 nt, Artificial Sequence
  RPE65 RNA guide
cuugcuguuuuagaugugauu

SEQ ID NO: 48059 - RNA, 21 nt, Artificial Sequence
  RPE65 RNA guide
cuugugcuuaaaaaggcaaga

SEQ ID NO: 48060 - RNA, 21 nt, Artificial Sequence
  RPE65 RNA guide
cuuuaaguucaccucucaggu

SEQ ID NO: 48061 - RNA, 21 nt, Artificial Sequence
  RPE65 RNA guide
cuuuauuccacaacccagaaa

SEQ ID NO: 48062 - RNA, 21 nt, Artificial Sequence
  RPE65 RNA guide
cuuuauuuucauccugugugg

SEQ ID NO: 48063 - RNA, 21 nt, Artificial Sequence
  RPE65 RNA guide
cuuucuguucugucuuccugu

SEQ ID NO: 48064 - RNA, 21 nt, Artificial Sequence
  RPE65 RNA guide
cuuuuguuuucaggugggguu

SEQ ID NO: 48065 - RNA, 21 nt, Artificial Sequence
  RPE65 RNA guide
cuuuuuaagcacaagugccug

SEQ ID NO: 48066 - RNA, 21 nt, Artificial Sequence
  RPE65 RNA guide
cuuuuucucccuucgcagaga

SEQ ID NO: 48067 - RNA, 21 nt, Artificial Sequence
  RPE65 RNA guide
gaaaaacgcaugucuuuuucu

SEQ ID NO: 48068 - RNA, 21 nt, Artificial Sequence
  RPE65 RNA guide
gaaaaagacaugcguuuuuca

SEQ ID NO: 48069 - RNA, 21 nt, Artificial Sequence
  RPE65 RNA guide
gaaaacaaaagauucugugac

SEQ ID NO: 48070 - RNA, 21 nt, Artificial Sequence
  RPE65 RNA guide
gaaaacuaaucggguccauga

SEQ ID NO: 48071 - RNA, 21 nt, Artificial Sequence
  RPE65 RNA guide
gaaaagcaguaggaaguuuag

SEQ ID NO: 48072 - RNA, 21 nt, Artificial Sequence
  RPE65 RNA guide
gaaaauaaagcaaccugcuua

SEQ ID NO: 48073 - RNA, 21 nt, Artificial Sequence
  RPE65 RNA guide
gaaacugcuauugagccaggu

SEQ ID NO: 48074 - RNA, 21 nt, Artificial Sequence
  RPE65 RNA guide
gaaacuugagccccaucuucu

SEQ ID NO: 48075 - RNA, 21 nt, Artificial Sequence
  RPE65 RNA guide
gaaaggacacuggacaaaugg

SEQ ID NO: 48076 - RNA, 21 nt, Artificial Sequence
  RPE65 RNA guide
gaaaguaucucaaggcugcug

SEQ ID NO: 48077 - RNA, 21 nt, Artificial Sequence
  RPE65 RNA guide
gaaauggcucugauacaccug

SEQ ID NO: 48078 - RNA, 21 nt, Artificial Sequence
  RPE65 RNA guide
gaaauuacgggguuuuuacag

SEQ ID NO: 48079 - RNA, 21 nt, Artificial Sequence
  RPE65 RNA guide
gaacaaugggaggugucccau

SEQ ID NO: 48080 - RNA, 21 nt, Artificial Sequence
  RPE65 RNA guide
gaacagaaaguaucucaaggc

SEQ ID NO: 48081 - RNA, 21 nt, Artificial Sequence
  RPE65 RNA guide
gaacaggcaggcacuugugcu

SEQ ID NO: 48082 - RNA, 21 nt, Artificial Sequence
  RPE65 RNA guide
gaaccccaccugaaaacaaaa

SEQ ID NO: 48083 - RNA, 21 nt, Artificial Sequence
  RPE65 RNA guide
gaacuuaaaguugacaaaauc

SEQ ID NO: 48084 - RNA, 21 nt, Artificial Sequence
  RPE65 RNA guide
gaagacagaacagaaaguauc

SEQ ID NO: 48085 - RNA, 21 nt, Artificial Sequence
  RPE65 RNA guide
gaagauggggcucaaguuucc

SEQ ID NO: 48086 - RNA, 21 nt, Artificial Sequence
  RPE65 RNA guide
gaagggagaaaaagacaugcg

SEQ ID NO: 48087 - RNA, 21 nt, Artificial Sequence
  RPE65 RNA guide
gaaguuuagguaaucugaaca

SEQ ID NO: 48088 - RNA, 21 nt, Artificial Sequence
  RPE65 RNA guide
gaauaaagaacaggcaggcac

SEQ ID NO: 48089 - RNA, 21 nt, Artificial Sequence
  RPE65 RNA guide
gaaucacaucuaaaacagcaa

SEQ ID NO: 48090 - RNA, 21 nt, Artificial Sequence
  RPE65 RNA guide
gaaucuuuuguuuucaggugg

SEQ ID NO: 48091 - RNA, 21 nt, Artificial Sequence
  RPE65 RNA guide
gaauggugacaggaagacaga

SEQ ID NO: 48092 - RNA, 21 nt, Artificial Sequence
  RPE65 RNA guide
gacaaaugggacaccucccau

SEQ ID NO: 48093 - RNA, 21 nt, Artificial Sequence
  RPE65 RNA guide
gacacaaacagaauggugaca

SEQ ID NO: 48094 - RNA, 21 nt, Artificial Sequence
  RPE65 RNA guide
gacaccucccauuguuccugg

SEQ ID NO: 48095 - RNA, 21 nt, Artificial Sequence
  RPE65 RNA guide
gacacuggacaaaugggacac

SEQ ID NO: 48096 - RNA, 21 nt, Artificial Sequence
  RPE65 RNA guide
gacagaacagaaaguaucuca

SEQ ID NO: 48097 - RNA, 21 nt, Artificial Sequence
  RPE65 RNA guide
gacaggaagacagaacagaaa

SEQ ID NO: 48098 - RNA, 21 nt, Artificial Sequence
  RPE65 RNA guide
gacaugcguuuuucagacuag

SEQ ID NO: 48099 - RNA, 21 nt, Artificial Sequence
  RPE65 RNA guide
gacccgauuaguuuucaauca

SEQ ID NO: 48100 - RNA, 21 nt, Artificial Sequence
  RPE65 RNA guide
gaccugagaggugaacuuaaa

SEQ ID NO: 48101 - RNA, 21 nt, Artificial Sequence
  RPE65 RNA guide
gacuagccaaaucacuaagaa

SEQ ID NO: 48102 - RNA, 21 nt, Artificial Sequence
  RPE65 RNA guide
gagaaaaagacaugcguuuuu

SEQ ID NO: 48103 - RNA, 21 nt, Artificial Sequence
  RPE65 RNA guide
gagaagauggggcucaaguuu

SEQ ID NO: 48104 - RNA, 21 nt, Artificial Sequence
  RPE65 RNA guide
gagagaugauucuugccuuuu

SEQ ID NO: 48105 - RNA, 21 nt, Artificial Sequence
  RPE65 RNA guide
gagaggugaacuuaaaguuga

SEQ ID NO: 48106 - RNA, 21 nt, Artificial Sequence
  RPE65 RNA guide
gagauacuuucuguucugucu

SEQ ID NO: 48107 - RNA, 21 nt, Artificial Sequence
  RPE65 RNA guide
gagaugauucuugccuuuuua

SEQ ID NO: 48108 - RNA, 21 nt, Artificial Sequence
  RPE65 RNA guide
gagcacaggcaaugacaaaua

SEQ ID NO: 48109 - RNA, 21 nt, Artificial Sequence
  RPE65 RNA guide
gagccagguguaucagagcca

SEQ ID NO: 48110 - RNA, 21 nt, Artificial Sequence
  RPE65 RNA guide
gagccauuuccucccgcccac

SEQ ID NO: 48111 - RNA, 21 nt, Artificial Sequence
  RPE65 RNA guide
gagccccaucuucucugcgaa

SEQ ID NO: 48112 - RNA, 21 nt, Artificial Sequence
  RPE65 RNA guide
gagcugcugcacucaaucuga

SEQ ID NO: 48113 - RNA, 21 nt, Artificial Sequence
  RPE65 RNA guide
gaggaaauggcucugauacac

SEQ ID NO: 48114 - RNA, 21 nt, Artificial Sequence
  RPE65 RNA guide
gaggugaacuuaaaguugaca

SEQ ID NO: 48115 - RNA, 21 nt, Artificial Sequence
  RPE65 RNA guide
gaggugucccauuuguccagu

SEQ ID NO: 48116 - RNA, 21 nt, Artificial Sequence
  RPE65 RNA guide
gagucaaaaauguaauuggaa

SEQ ID NO: 48117 - RNA, 21 nt, Artificial Sequence
  RPE65 RNA guide
gagugcagcagcucuguaaaa

SEQ ID NO: 48118 - RNA, 21 nt, Artificial Sequence
  RPE65 RNA guide
gauacaccuggcucaauagca

SEQ ID NO: 48119 - RNA, 21 nt, Artificial Sequence
  RPE65 RNA guide
gauacuuucuguucugucuuc

SEQ ID NO: 48120 - RNA, 21 nt, Artificial Sequence
  RPE65 RNA guide
gaugaaaauaaagcaaccugc

SEQ ID NO: 48121 - RNA, 21 nt, Artificial Sequence
  RPE65 RNA guide
gaugauucuugccuuuuuaag

SEQ ID NO: 48122 - RNA, 21 nt, Artificial Sequence
  RPE65 RNA guide
gaugugauucagauugagugc

SEQ ID NO: 48123 - RNA, 21 nt, Artificial Sequence
  RPE65 RNA guide
gauguucagauuaccuaaacu

SEQ ID NO: 48124 - RNA, 21 nt, Artificial Sequence
  RPE65 RNA guide
gauuaaugauugaaaacuaau

SEQ ID NO: 48125 - RNA, 21 nt, Artificial Sequence
  RPE65 RNA guide
gauuaccuaaacuuccuacug

SEQ ID NO: 48126 - RNA, 21 nt, Artificial Sequence
  RPE65 RNA guide
gauucagauugagugcagcag

SEQ ID NO: 48127 - RNA, 21 nt, Artificial Sequence
  RPE65 RNA guide
gauucugugaccugagaggug

SEQ ID NO: 48128 - RNA, 21 nt, Artificial Sequence
  RPE65 RNA guide
gauucuugccuuuuuaagcac

SEQ ID NO: 48129 - RNA, 21 nt, Artificial Sequence
  RPE65 RNA guide
gauugaaaacuaaucgggucc

SEQ ID NO: 48130 - RNA, 21 nt, Artificial Sequence
  RPE65 RNA guide
gauugagugcagcagcucugu

SEQ ID NO: 48131 - RNA, 21 nt, Artificial Sequence
  RPE65 RNA guide
gauuuggcuagucugaaaaac

SEQ ID NO: 48132 - RNA, 21 nt, Artificial Sequence
  RPE65 RNA guide
gauuuguuuaaguaacagcag

SEQ ID NO: 48133 - RNA, 21 nt, Artificial Sequence
  RPE65 RNA guide
gauuuugucaacuuuaaguuc

SEQ ID NO: 48134 - RNA, 21 nt, Artificial Sequence
  RPE65 RNA guide
gcaaccugcuuaauggauuug

SEQ ID NO: 48135 - RNA, 21 nt, Artificial Sequence
  RPE65 RNA guide
gcacaagugccugccuguucu

SEQ ID NO: 48136 - RNA, 21 nt, Artificial Sequence
  RPE65 RNA guide
gcacaggcaaugacaaauaau

SEQ ID NO: 48137 - RNA, 21 nt, Artificial Sequence
  RPE65 RNA guide
gcacucaaucugaaucacauc

SEQ ID NO: 48138 - RNA, 21 nt, Artificial Sequence
  RPE65 RNA guide
gcacuugugcuuaaaaaggca

SEQ ID NO: 48139 - RNA, 21 nt, Artificial Sequence
  RPE65 RNA guide
gcagagaagauggggcucaag

SEQ ID NO: 48140 - RNA, 21 nt, Artificial Sequence
  RPE65 RNA guide
gcagcagcucuguaaaaaccc

SEQ ID NO: 48141 - RNA, 21 nt, Artificial Sequence
  RPE65 RNA guide
gcagccuugagauacuuucug

SEQ ID NO: 48142 - RNA, 21 nt, Artificial Sequence
  RPE65 RNA guide
gcagcucuguaaaaaccccgu

SEQ ID NO: 48143 - RNA, 21 nt, Artificial Sequence
  RPE65 RNA guide
gcaggcacuugugcuuaaaaa

SEQ ID NO: 48144 - RNA, 21 nt, Artificial Sequence
  RPE65 RNA guide
gcagguugcuuuauuuucauc

SEQ ID NO: 48145 - RNA, 21 nt, Artificial Sequence
  RPE65 RNA guide
gcaguaggaaguuuagguaau

SEQ ID NO: 48146 - RNA, 21 nt, Artificial Sequence
  RPE65 RNA guide
gcaguuucuggguuguggaau

SEQ ID NO: 48147 - RNA, 21 nt, Artificial Sequence
  RPE65 RNA guide
gcaugucuuuuucucccuucg

SEQ ID NO: 48148 - RNA, 21 nt, Artificial Sequence
  RPE65 RNA guide
gccaaaucacuaagaagacaa

SEQ ID NO: 48149 - RNA, 21 nt, Artificial Sequence
  RPE65 RNA guide
gccagguguaucagagccauu

SEQ ID NO: 48150 - RNA, 21 nt, Artificial Sequence
  RPE65 RNA guide
gccauuuccucccgcccacac

SEQ ID NO: 48151 - RNA, 21 nt, Artificial Sequence
  RPE65 RNA guide
gcccacacaggaugaaaauaa

SEQ ID NO: 48152 - RNA, 21 nt, Artificial Sequence
  RPE65 RNA guide
gccccaucuucucugcgaagg

SEQ ID NO: 48153 - RNA, 21 nt, Artificial Sequence
  RPE65 RNA guide
gccugccuguucuuuauucca

SEQ ID NO: 48154 - RNA, 21 nt, Artificial Sequence
  RPE65 RNA guide
gccugugcucauguuugacuu

SEQ ID NO: 48155 - RNA, 21 nt, Artificial Sequence
  RPE65 RNA guide
gccuguucuuuauuccacaac

SEQ ID NO: 48156 - RNA, 21 nt, Artificial Sequence
  RPE65 RNA guide
gccuugagauacuuucuguuc

SEQ ID NO: 48157 - RNA, 21 nt, Artificial Sequence
  RPE65 RNA guide
gccuuuuuaagcacaagugcc

SEQ ID NO: 48158 - RNA, 21 nt, Artificial Sequence
  RPE65 RNA guide
gcgaagggagaaaaagacaug

SEQ ID NO: 48159 - RNA, 21 nt, Artificial Sequence
  RPE65 RNA guide
gcgggaggaaauggcucugau

SEQ ID NO: 48160 - RNA, 21 nt, Artificial Sequence
  RPE65 RNA guide
gcguuuuucagacuagccaaa

SEQ ID NO: 48161 - RNA, 21 nt, Artificial Sequence
  RPE65 RNA guide
gcuagucugaaaaacgcaugu

SEQ ID NO: 48162 - RNA, 21 nt, Artificial Sequence
  RPE65 RNA guide
gcuauugagccagguguauca

SEQ ID NO: 48163 - RNA, 21 nt, Artificial Sequence
  RPE65 RNA guide
gcucaauagcaguuucugggu

SEQ ID NO: 48164 - RNA, 21 nt, Artificial Sequence
  RPE65 RNA guide
gcucugauacaccuggcucaa

SEQ ID NO: 48165 - RNA, 21 nt, Artificial Sequence
  RPE65 RNA guide
gcucuguaaaaaccccguaau

SEQ ID NO: 48166 - RNA, 21 nt, Artificial Sequence
  RPE65 RNA guide
gcugcacucaaucugaaucac

SEQ ID NO: 48167 - RNA, 21 nt, Artificial Sequence
  RPE65 RNA guide
gcugcugcacucaaucugaau

SEQ ID NO: 48168 - RNA, 21 nt, Artificial Sequence
  RPE65 RNA guide
gcugcuguuacuuaaacaaau

SEQ ID NO: 48169 - RNA, 21 nt, Artificial Sequence
  RPE65 RNA guide
gcuguugucuucuuagugauu

SEQ ID NO: 48170 - RNA, 21 nt, Artificial Sequence
  RPE65 RNA guide
gcuguuuuagaugugauucag

SEQ ID NO: 48171 - RNA, 21 nt, Artificial Sequence
  RPE65 RNA guide
gcuuaaaaaggcaagaaucau

SEQ ID NO: 48172 - RNA, 21 nt, Artificial Sequence
  RPE65 RNA guide
gcuuuauuuucauccugugug

SEQ ID NO: 48173 - RNA, 21 nt, Artificial Sequence
  RPE65 RNA guide
gcuuuuccaauuacauuuuug

SEQ ID NO: 48174 - RNA, 21 nt, Artificial Sequence
  RPE65 RNA guide
ggaaaagcaguaggaaguuua

SEQ ID NO: 48175 - RNA, 21 nt, Artificial Sequence
  RPE65 RNA guide
ggaaacuugagccccaucuuc

SEQ ID NO: 48176 - RNA, 21 nt, Artificial Sequence
  RPE65 RNA guide
ggaaauggcucugauacaccu

SEQ ID NO: 48177 - RNA, 21 nt, Artificial Sequence
  RPE65 RNA guide
ggaaauuacgggguuuuuaca

SEQ ID NO: 48178 - RNA, 21 nt, Artificial Sequence
  RPE65 RNA guide
ggaacaaugggagguguccca

SEQ ID NO: 48179 - RNA, 21 nt, Artificial Sequence
  RPE65 RNA guide
ggaagacagaacagaaaguau

SEQ ID NO: 48180 - RNA, 21 nt, Artificial Sequence
  RPE65 RNA guide
ggaaguuuagguaaucugaac

SEQ ID NO: 48181 - RNA, 21 nt, Artificial Sequence
  RPE65 RNA guide
ggaauaaagaacaggcaggca

SEQ ID NO: 48182 - RNA, 21 nt, Artificial Sequence
  RPE65 RNA guide
ggacaaaugggacaccuccca

SEQ ID NO: 48183 - RNA, 21 nt, Artificial Sequence
  RPE65 RNA guide
ggacacaaacagaauggugac

SEQ ID NO: 48184 - RNA, 21 nt, Artificial Sequence
  RPE65 RNA guide
ggacaccucccauuguuccug

SEQ ID NO: 48185 - RNA, 21 nt, Artificial Sequence
  RPE65 RNA guide
ggacacuggacaaaugggaca

SEQ ID NO: 48186 - RNA, 21 nt, Artificial Sequence
  RPE65 RNA guide
ggacccgauuaguuuucaauc

SEQ ID NO: 48187 - RNA, 21 nt, Artificial Sequence
  RPE65 RNA guide
ggagaaaaagacaugcguuuu

SEQ ID NO: 48188 - RNA, 21 nt, Artificial Sequence
  RPE65 RNA guide
ggaggaaauggcucugauaca

SEQ ID NO: 48189 - RNA, 21 nt, Artificial Sequence
  RPE65 RNA guide
ggaggugucccauuuguccag

SEQ ID NO: 48190 - RNA, 21 nt, Artificial Sequence
  RPE65 RNA guide
ggaugaaaauaaagcaaccug

SEQ ID NO: 48191 - RNA, 21 nt, Artificial Sequence
  RPE65 RNA guide
ggauuuguuuaaguaacagca

SEQ ID NO: 48192 - RNA, 21 nt, Artificial Sequence
  RPE65 RNA guide
ggauuuugucaacuuuaaguu

SEQ ID NO: 48193 - RNA, 21 nt, Artificial Sequence
  RPE65 RNA guide
ggcaagaaucaucucucuaaa

SEQ ID NO: 48194 - RNA, 21 nt, Artificial Sequence
  RPE65 RNA guide
ggcaaugacaaauaauuuuag

SEQ ID NO: 48195 - RNA, 21 nt, Artificial Sequence
  RPE65 RNA guide
ggcacuugugcuuaaaaaggc

SEQ ID NO: 48196 - RNA, 21 nt, Artificial Sequence
  RPE65 RNA guide
ggcaggcacuugugcuuaaaa

SEQ ID NO: 48197 - RNA, 21 nt, Artificial Sequence
  RPE65 RNA guide
ggcgggaggaaauggcucuga

SEQ ID NO: 48198 - RNA, 21 nt, Artificial Sequence
  RPE65 RNA guide
ggcuagucugaaaaacgcaug

SEQ ID NO: 48199 - RNA, 21 nt, Artificial Sequence
  RPE65 RNA guide
ggcucaauagcaguuucuggg

SEQ ID NO: 48200 - RNA, 21 nt, Artificial Sequence
  RPE65 RNA guide
ggcucugauacaccuggcuca

SEQ ID NO: 48201 - RNA, 21 nt, Artificial Sequence
  RPE65 RNA guide
ggcugcuguuacuuaaacaaa

SEQ ID NO: 48202 - RNA, 21 nt, Artificial Sequence
  RPE65 RNA guide
gggaaacuugagccccaucuu

SEQ ID NO: 48203 - RNA, 21 nt, Artificial Sequence
  RPE65 RNA guide
gggacaccucccauuguuccu

SEQ ID NO: 48204 - RNA, 21 nt, Artificial Sequence
  RPE65 RNA guide
gggagaaaaagacaugcguuu

SEQ ID NO: 48205 - RNA, 21 nt, Artificial Sequence
  RPE65 RNA guide
gggaggaaauggcucugauac

SEQ ID NO: 48206 - RNA, 21 nt, Artificial Sequence
  RPE65 RNA guide
gggaggugucccauuugucca

SEQ ID NO: 48207 - RNA, 21 nt, Artificial Sequence
  RPE65 RNA guide
gggcgggaggaaauggcucug

SEQ ID NO: 48208 - RNA, 21 nt, Artificial Sequence
  RPE65 RNA guide
ggggaaacuugagccccaucu

SEQ ID NO: 48209 - RNA, 21 nt, Artificial Sequence
  RPE65 RNA guide
gggguucauggacccgauuag

SEQ ID NO: 48210 - RNA, 21 nt, Artificial Sequence
  RPE65 RNA guide
gggguuuuuacagagcugcug

SEQ ID NO: 48211 - RNA, 21 nt, Artificial Sequence
  RPE65 RNA guide
ggguccaugaaccccaccuga

SEQ ID NO: 48212 - RNA, 21 nt, Artificial Sequence
  RPE65 RNA guide
ggguucauggacccgauuagu

SEQ ID NO: 48213 - RNA, 21 nt, Artificial Sequence
  RPE65 RNA guide
ggguuguggaauaaagaacag

SEQ ID NO: 48214 - RNA, 21 nt, Artificial Sequence
  RPE65 RNA guide
ggguuuuuacagagcugcugc

SEQ ID NO: 48215 - RNA, 21 nt, Artificial Sequence
  RPE65 RNA guide
gguaaucugaacaucaaaacu

SEQ ID NO: 48216 - RNA, 21 nt, Artificial Sequence
  RPE65 RNA guide
ggucacagaaucuuuuguuuu

SEQ ID NO: 48217 - RNA, 21 nt, Artificial Sequence
  RPE65 RNA guide
gguccaugaaccccaccugaa

SEQ ID NO: 48218 - RNA, 21 nt, Artificial Sequence
  RPE65 RNA guide
ggugacaggaagacagaacag

SEQ ID NO: 48219 - RNA, 21 nt, Artificial Sequence
  RPE65 RNA guide
ggugggguucauggacccgau

SEQ ID NO: 48220 - RNA, 21 nt, Artificial Sequence
  RPE65 RNA guide
gguguaucagagccauuuccu

SEQ ID NO: 48221 - RNA, 21 nt, Artificial Sequence
  RPE65 RNA guide
ggugucccauuuguccagugu

SEQ ID NO: 48222 - RNA, 21 nt, Artificial Sequence
  RPE65 RNA guide
gguucauggacccgauuaguu

SEQ ID NO: 48223 - RNA, 21 nt, Artificial Sequence
  RPE65 RNA guide
gguugcuuuauuuucauccug

SEQ ID NO: 48224 - RNA, 21 nt, Artificial Sequence
  RPE65 RNA guide
gguuguggaauaaagaacagg

SEQ ID NO: 48225 - RNA, 21 nt, Artificial Sequence
  RPE65 RNA guide
gguuuuuacagagcugcugca

SEQ ID NO: 48226 - RNA, 21 nt, Artificial Sequence
  RPE65 RNA guide
guaaaaaccccguaauuucca

SEQ ID NO: 48227 - RNA, 21 nt, Artificial Sequence
  RPE65 RNA guide
guaacagcagccuugagauac

SEQ ID NO: 48228 - RNA, 21 nt, Artificial Sequence
  RPE65 RNA guide
guaagaaaggacacuggacaa

SEQ ID NO: 48229 - RNA, 21 nt, Artificial Sequence
  RPE65 RNA guide
guaauuggaaaagcaguagga

SEQ ID NO: 48230 - RNA, 21 nt, Artificial Sequence
  RPE65 RNA guide
guaauuuccaggaacaauggg

SEQ ID NO: 48231 - RNA, 21 nt, Artificial Sequence
  RPE65 RNA guide
guaggaaguuuagguaaucug

SEQ ID NO: 48232 - RNA, 21 nt, Artificial Sequence
  RPE65 RNA guide
guaucagagccauuuccuccc

SEQ ID NO: 48233 - RNA, 21 nt, Artificial Sequence
  RPE65 RNA guide
guaucucaaggcugcuguuac

SEQ ID NO: 48234 - RNA, 21 nt, Artificial Sequence
  RPE65 RNA guide
gucaaaaauguaauuggaaaa

SEQ ID NO: 48235 - RNA, 21 nt, Artificial Sequence
  RPE65 RNA guide
gucaaacaugagcacaggcaa

SEQ ID NO: 48236 - RNA, 21 nt, Artificial Sequence
  RPE65 RNA guide
gucaacuuuaaguucaccucu

SEQ ID NO: 48237 - RNA, 21 nt, Artificial Sequence
  RPE65 RNA guide
gucacagaaucuuuuguuuuc

SEQ ID NO: 48238 - RNA, 21 nt, Artificial Sequence
  RPE65 RNA guide
gucaccauucuguuugugucc

SEQ ID NO: 48239 - RNA, 21 nt, Artificial Sequence
  RPE65 RNA guide
gucauugccugugcucauguu

SEQ ID NO: 48240 - RNA, 21 nt, Artificial Sequence
  RPE65 RNA guide
guccaugaaccccaccugaaa

SEQ ID NO: 48241 - RNA, 21 nt, Artificial Sequence
  RPE65 RNA guide
gucccauuuguccaguguccu

SEQ ID NO: 48242 - RNA, 21 nt, Artificial Sequence
  RPE65 RNA guide
gucugaaaaacgcaugucuuu

SEQ ID NO: 48243 - RNA, 21 nt, Artificial Sequence
  RPE65 RNA guide
gucuuccugucaccauucugu

SEQ ID NO: 48244 - RNA, 21 nt, Artificial Sequence
  RPE65 RNA guide
gucuucuuagugauuuggcua

SEQ ID NO: 48245 - RNA, 21 nt, Artificial Sequence
  RPE65 RNA guide
gucuuuuucucccuucgcaga

SEQ ID NO: 48246 - RNA, 21 nt, Artificial Sequence
  RPE65 RNA guide
gugaacuuaaaguugacaaaa

SEQ ID NO: 48247 - RNA, 21 nt, Artificial Sequence
  RPE65 RNA guide
gugacaggaagacagaacaga

SEQ ID NO: 48248 - RNA, 21 nt, Artificial Sequence
  RPE65 RNA guide
gugaccugagaggugaacuua

SEQ ID NO: 48249 - RNA, 21 nt, Artificial Sequence
  RPE65 RNA guide
gugagagucaaaaauguaauu

SEQ ID NO: 48250 - RNA, 21 nt, Artificial Sequence
  RPE65 RNA guide
gugauucagauugagugcagc

SEQ ID NO: 48251 - RNA, 21 nt, Artificial Sequence
  RPE65 RNA guide
gugauuuggcuagucugaaaa

SEQ ID NO: 48252 - RNA, 21 nt, Artificial Sequence
  RPE65 RNA guide
gugcagcagcucuguaaaaac

SEQ ID NO: 48253 - RNA, 21 nt, Artificial Sequence
  RPE65 RNA guide
gugccugccuguucuuuauuc

SEQ ID NO: 48254 - RNA, 21 nt, Artificial Sequence
  RPE65 RNA guide
gugcuuaaaaaggcaagaauc

SEQ ID NO: 48255 - RNA, 21 nt, Artificial Sequence
  RPE65 RNA guide
guggaauaaagaacaggcagg

SEQ ID NO: 48256 - RNA, 21 nt, Artificial Sequence
  RPE65 RNA guide
gugggcgggaggaaauggcuc

SEQ ID NO: 48257 - RNA, 21 nt, Artificial Sequence
  RPE65 RNA guide
gugggguucauggacccgauu

SEQ ID NO: 48258 - RNA, 21 nt, Artificial Sequence
  RPE65 RNA guide
guguaucagagccauuuccuc

SEQ ID NO: 48259 - RNA, 21 nt, Artificial Sequence
  RPE65 RNA guide
gugucccauuuguccaguguc

SEQ ID NO: 48260 - RNA, 21 nt, Artificial Sequence
  RPE65 RNA guide
gugugggcgggaggaaauggc

SEQ ID NO: 48261 - RNA, 21 nt, Artificial Sequence
  RPE65 RNA guide
guucaccucucaggucacaga

SEQ ID NO: 48262 - RNA, 21 nt, Artificial Sequence
  RPE65 RNA guide
guucagauuaccuaaacuucc

SEQ ID NO: 48263 - RNA, 21 nt, Artificial Sequence
  RPE65 RNA guide
guucauggacccgauuaguuu

SEQ ID NO: 48264 - RNA, 21 nt, Artificial Sequence
  RPE65 RNA guide
guuccuggaaauuacgggguu

SEQ ID NO: 48265 - RNA, 21 nt, Artificial Sequence
  RPE65 RNA guide
guucugucuuccugucaccau

SEQ ID NO: 48266 - RNA, 21 nt, Artificial Sequence
  RPE65 RNA guide
guucuuuauuccacaacccag

SEQ ID NO: 48267 - RNA, 21 nt, Artificial Sequence
  RPE65 RNA guide
guugcuuuauuuucauccugu

SEQ ID NO: 48268 - RNA, 21 nt, Artificial Sequence
  RPE65 RNA guide
guugucuucuuagugauuugg

SEQ ID NO: 48269 - RNA, 21 nt, Artificial Sequence
  RPE65 RNA guide
guuguggaauaaagaacaggc

SEQ ID NO: 48270 - RNA, 21 nt, Artificial Sequence
  RPE65 RNA guide
guuuaaguaacagcagccuug

SEQ ID NO: 48271 - RNA, 21 nt, Artificial Sequence
  RPE65 RNA guide
guuuagguaaucugaacauca

SEQ ID NO: 48272 - RNA, 21 nt, Artificial Sequence
  RPE65 RNA guide
guuucuggguuguggaauaaa

SEQ ID NO: 48273 - RNA, 21 nt, Artificial Sequence
  RPE65 RNA guide
guuuuagaugugauucagauu

SEQ ID NO: 48274 - RNA, 21 nt, Artificial Sequence
  RPE65 RNA guide
guuuucaggugggguucaugg

SEQ ID NO: 48275 - RNA, 21 nt, Artificial Sequence
  RPE65 RNA guide
guuuugauguucagauuaccu

SEQ ID NO: 48276 - RNA, 21 nt, Artificial Sequence
  RPE65 RNA guide
guuuuuacagagcugcugcac

SEQ ID NO: 48277 - RNA, 21 nt, Artificial Sequence
  RPE65 RNA guide
guuuuucagacuagccaaauc

SEQ ID NO: 48278 - RNA, 21 nt, Artificial Sequence
  RPE65 RNA guide
uaaaaaccccguaauuuccag

SEQ ID NO: 48279 - RNA, 21 nt, Artificial Sequence
  RPE65 RNA guide
uaaaaaggcaagaaucaucuc

SEQ ID NO: 48280 - RNA, 21 nt, Artificial Sequence
  RPE65 RNA guide
uaaaaagucaaacaugagcac

SEQ ID NO: 48281 - RNA, 21 nt, Artificial Sequence
  RPE65 RNA guide
uaaaauuauuugucauugccu

SEQ ID NO: 48282 - RNA, 21 nt, Artificial Sequence
  RPE65 RNA guide
uaaacaaauccauuaagcagg

SEQ ID NO: 48283 - RNA, 21 nt, Artificial Sequence
  RPE65 RNA guide
uaaacuuccuacugcuuuucc

SEQ ID NO: 48284 - RNA, 21 nt, Artificial Sequence
  RPE65 RNA guide
uaaagaacaggcaggcacuug

SEQ ID NO: 48285 - RNA, 21 nt, Artificial Sequence
  RPE65 RNA guide
uaaagcaaccugcuuaaugga

SEQ ID NO: 48286 - RNA, 21 nt, Artificial Sequence
  RPE65 RNA guide
uaacagcagccuugagauacu

SEQ ID NO: 48287 - RNA, 21 nt, Artificial Sequence
  RPE65 RNA guide
uaacucuugcuguuuuagaug

SEQ ID NO: 48288 - RNA, 21 nt, Artificial Sequence
  RPE65 RNA guide
uaagaaaggacacuggacaaa

SEQ ID NO: 48289 - RNA, 21 nt, Artificial Sequence
  RPE65 RNA guide
uaagcacaagugccugccugu

SEQ ID NO: 48290 - RNA, 21 nt, Artificial Sequence
  RPE65 RNA guide
uaagcagguugcuuuauuuuc

SEQ ID NO: 48291 - RNA, 21 nt, Artificial Sequence
  RPE65 RNA guide
uaaggacacaaacagaauggu

SEQ ID NO: 48292 - RNA, 21 nt, Artificial Sequence
  RPE65 RNA guide
uaaguaacagcagccuugaga

SEQ ID NO: 48293 - RNA, 21 nt, Artificial Sequence
  RPE65 RNA guide
uaaguucaccucucaggucac

SEQ ID NO: 48294 - RNA, 21 nt, Artificial Sequence
  RPE65 RNA guide
uaaucggguccaugaacccca

SEQ ID NO: 48295 - RNA, 21 nt, Artificial Sequence
  RPE65 RNA guide
uaaugauugaaaacuaaucgg

SEQ ID NO: 48296 - RNA, 21 nt, Artificial Sequence
  RPE65 RNA guide
uaauuggaaaagcaguaggaa

SEQ ID NO: 48297 - RNA, 21 nt, Artificial Sequence
  RPE65 RNA guide
uaauuuccaggaacaauggga

SEQ ID NO: 48298 - RNA, 21 nt, Artificial Sequence
  RPE65 RNA guide
uaauuuuagagagaugauucu

SEQ ID NO: 48299 - RNA, 21 nt, Artificial Sequence
  RPE65 RNA guide
uacaccuggcucaauagcagu

SEQ ID NO: 48300 - RNA, 21 nt, Artificial Sequence
  RPE65 RNA guide
uacagagcugcugcacucaau

SEQ ID NO: 48301 - RNA, 21 nt, Artificial Sequence
  RPE65 RNA guide
uacauuuuugacucucacaua

SEQ ID NO: 48302 - RNA, 21 nt, Artificial Sequence
  RPE65 RNA guide
uaccuaaacuuccuacugcuu

SEQ ID NO: 48303 - RNA, 21 nt, Artificial Sequence
  RPE65 RNA guide
uacgggguuuuuacagagcug

SEQ ID NO: 48304 - RNA, 21 nt, Artificial Sequence
  RPE65 RNA guide
uacuuaaacaaauccauuaag

SEQ ID NO: 48305 - RNA, 21 nt, Artificial Sequence
  RPE65 RNA guide
uacuuucuguucugucuuccu

SEQ ID NO: 48306 - RNA, 21 nt, Artificial Sequence
  RPE65 RNA guide
uagagagaugauucuugccuu

SEQ ID NO: 48307 - RNA, 21 nt, Artificial Sequence
  RPE65 RNA guide
uagaugugauucagauugagu

SEQ ID NO: 48308 - RNA, 21 nt, Artificial Sequence
  RPE65 RNA guide
uagcaguuucuggguugugga

SEQ ID NO: 48309 - RNA, 21 nt, Artificial Sequence
  RPE65 RNA guide
uagccaaaucacuaagaagac

SEQ ID NO: 48310 - RNA, 21 nt, Artificial Sequence
  RPE65 RNA guide
uaggaaguuuagguaaucuga

SEQ ID NO: 48311 - RNA, 21 nt, Artificial Sequence
  RPE65 RNA guide
uagucugaaaaacgcaugucu

SEQ ID NO: 48312 - RNA, 21 nt, Artificial Sequence
  RPE65 RNA guide
uagugauuuggcuagucugaa

SEQ ID NO: 48313 - RNA, 21 nt, Artificial Sequence
  RPE65 RNA guide
uaucagagccauuuccucccg

SEQ ID NO: 48314 - RNA, 21 nt, Artificial Sequence
  RPE65 RNA guide
uaucucaaggcugcuguuacu

SEQ ID NO: 48315 - RNA, 21 nt, Artificial Sequence
  RPE65 RNA guide
uauuccacaacccagaaacug

SEQ ID NO: 48316 - RNA, 21 nt, Artificial Sequence
  RPE65 RNA guide
uauugagccagguguaucaga

SEQ ID NO: 48317 - RNA, 21 nt, Artificial Sequence
  RPE65 RNA guide
uauuugucauugccugugcuc

SEQ ID NO: 48318 - RNA, 21 nt, Artificial Sequence
  RPE65 RNA guide
uauuuucauccugugugggcg

SEQ ID NO: 48319 - RNA, 21 nt, Artificial Sequence
  RPE65 RNA guide
ucaaacaugagcacaggcaau

SEQ ID NO: 48320 - RNA, 21 nt, Artificial Sequence
  RPE65 RNA guide
ucaacuuuaaguucaccucuc

SEQ ID NO: 48321 - RNA, 21 nt, Artificial Sequence
  RPE65 RNA guide
ucaaggcugcuguuacuuaaa

SEQ ID NO: 48322 - RNA, 21 nt, Artificial Sequence
  RPE65 RNA guide
ucaauagcaguuucuggguug

SEQ ID NO: 48323 - RNA, 21 nt, Artificial Sequence
  RPE65 RNA guide
ucaaucugaaucacaucuaaa

SEQ ID NO: 48324 - RNA, 21 nt, Artificial Sequence
  RPE65 RNA guide
ucacagaaucuuuuguuuuca

SEQ ID NO: 48325 - RNA, 21 nt, Artificial Sequence
  RPE65 RNA guide
ucaccauucuguuuguguccu

SEQ ID NO: 48326 - RNA, 21 nt, Artificial Sequence
  RPE65 RNA guide
ucaccucucaggucacagaau

SEQ ID NO: 48327 - RNA, 21 nt, Artificial Sequence
  RPE65 RNA guide
ucagacuagccaaaucacuaa

SEQ ID NO: 48328 - RNA, 21 nt, Artificial Sequence
  RPE65 RNA guide
ucagagccauuuccucccgcc

SEQ ID NO: 48329 - RNA, 21 nt, Artificial Sequence
  RPE65 RNA guide
ucagauuaccuaaacuuccua

SEQ ID NO: 48330 - RNA, 21 nt, Artificial Sequence
  RPE65 RNA guide
ucagauugagugcagcagcuc

SEQ ID NO: 48331 - RNA, 21 nt, Artificial Sequence
  RPE65 RNA guide
ucaggucacagaaucuuuugu

SEQ ID NO: 48332 - RNA, 21 nt, Artificial Sequence
  RPE65 RNA guide
ucaggugggguucauggaccc

SEQ ID NO: 48333 - RNA, 21 nt, Artificial Sequence
  RPE65 RNA guide
ucauaguuuugauguucagau

SEQ ID NO: 48334 - RNA, 21 nt, Artificial Sequence
  RPE65 RNA guide
ucauccugugugggcgggagg

SEQ ID NO: 48335 - RNA, 21 nt, Artificial Sequence
  RPE65 RNA guide
ucauggacccgauuaguuuuc

SEQ ID NO: 48336 - RNA, 21 nt, Artificial Sequence
  RPE65 RNA guide
ucauugccugugcucauguuu

SEQ ID NO: 48337 - RNA, 21 nt, Artificial Sequence
  RPE65 RNA guide
uccaauuacauuuuugacucu

SEQ ID NO: 48338 - RNA, 21 nt, Artificial Sequence
  RPE65 RNA guide
uccacaacccagaaacugcua

SEQ ID NO: 48339 - RNA, 21 nt, Artificial Sequence
  RPE65 RNA guide
uccaggaacaaugggaggugu

SEQ ID NO: 48340 - RNA, 21 nt, Artificial Sequence
  RPE65 RNA guide
uccaugaaccccaccugaaaa

SEQ ID NO: 48341 - RNA, 21 nt, Artificial Sequence
  RPE65 RNA guide
uccauuaagcagguugcuuua

SEQ ID NO: 48342 - RNA, 21 nt, Artificial Sequence
  RPE65 RNA guide
ucccauuguuccuggaaauua

SEQ ID NO: 48343 - RNA, 21 nt, Artificial Sequence
  RPE65 RNA guide
ucccauuuguccaguguccuu

SEQ ID NO: 48344 - RNA, 21 nt, Artificial Sequence
  RPE65 RNA guide
ucccgcccacacaggaugaaa

SEQ ID NO: 48345 - RNA, 21 nt, Artificial Sequence
  RPE65 RNA guide
ucccuucgcagagaagauggg

SEQ ID NO: 48346 - RNA, 21 nt, Artificial Sequence
  RPE65 RNA guide
uccuacugcuuuuccaauuac

SEQ ID NO: 48347 - RNA, 21 nt, Artificial Sequence
  RPE65 RNA guide
uccucccgcccacacaggaug

SEQ ID NO: 48348 - RNA, 21 nt, Artificial Sequence
  RPE65 RNA guide
uccuggaaauuacgggguuuu

SEQ ID NO: 48349 - RNA, 21 nt, Artificial Sequence
  RPE65 RNA guide
uccugucaccauucuguuugu

SEQ ID NO: 48350 - RNA, 21 nt, Artificial Sequence
  RPE65 RNA guide
uccugugugggcgggaggaaa

SEQ ID NO: 48351 - RNA, 21 nt, Artificial Sequence
  RPE65 RNA guide
ucgcagagaagauggggcuca

SEQ ID NO: 48352 - RNA, 21 nt, Artificial Sequence
  RPE65 RNA guide
ucggguccaugaaccccaccu

SEQ ID NO: 48353 - RNA, 21 nt, Artificial Sequence
  RPE65 RNA guide
ucucaaggcugcuguuacuua

SEQ ID NO: 48354 - RNA, 21 nt, Artificial Sequence
  RPE65 RNA guide
ucucaggucacagaaucuuuu

SEQ ID NO: 48355 - RNA, 21 nt, Artificial Sequence
  RPE65 RNA guide
ucucccuucgcagagaagaug

SEQ ID NO: 48356 - RNA, 21 nt, Artificial Sequence
  RPE65 RNA guide
ucucugcgaagggagaaaaag

SEQ ID NO: 48357 - RNA, 21 nt, Artificial Sequence
  RPE65 RNA guide
ucugaaaaacgcaugucuuuu

SEQ ID NO: 48358 - RNA, 21 nt, Artificial Sequence
  RPE65 RNA guide
ucugaaucacaucuaaaacag

SEQ ID NO: 48359 - RNA, 21 nt, Artificial Sequence
  RPE65 RNA guide
ucugauacaccuggcucaaua

SEQ ID NO: 48360 - RNA, 21 nt, Artificial Sequence
  RPE65 RNA guide
ucugcgaagggagaaaaagac

SEQ ID NO: 48361 - RNA, 21 nt, Artificial Sequence
  RPE65 RNA guide
ucuggguuguggaauaaagaa

SEQ ID NO: 48362 - RNA, 21 nt, Artificial Sequence
  RPE65 RNA guide
ucuguaaaaaccccguaauuu

SEQ ID NO: 48363 - RNA, 21 nt, Artificial Sequence
  RPE65 RNA guide
ucugucuuccugucaccauuc

SEQ ID NO: 48364 - RNA, 21 nt, Artificial Sequence
  RPE65 RNA guide
ucugugaccugagaggugaac

SEQ ID NO: 48365 - RNA, 21 nt, Artificial Sequence
  RPE65 RNA guide
ucuguucugucuuccugucac

SEQ ID NO: 48366 - RNA, 21 nt, Artificial Sequence
  RPE65 RNA guide
ucuuagugauuuggcuagucu

SEQ ID NO: 48367 - RNA, 21 nt, Artificial Sequence
  RPE65 RNA guide
ucuuccugucaccauucuguu

SEQ ID NO: 48368 - RNA, 21 nt, Artificial Sequence
  RPE65 RNA guide
ucuucucugcgaagggagaaa

SEQ ID NO: 48369 - RNA, 21 nt, Artificial Sequence
  RPE65 RNA guide
ucuucuuagugauuuggcuag

SEQ ID NO: 48370 - RNA, 21 nt, Artificial Sequence
  RPE65 RNA guide
ucuugccuuuuuaagcacaag

SEQ ID NO: 48371 - RNA, 21 nt, Artificial Sequence
  RPE65 RNA guide
ucuugcuguuuuagaugugau

SEQ ID NO: 48372 - RNA, 21 nt, Artificial Sequence
  RPE65 RNA guide
ucuuuauuccacaacccagaa

SEQ ID NO: 48373 - RNA, 21 nt, Artificial Sequence
  RPE65 RNA guide
ucuuuuguuuucagguggggu

SEQ ID NO: 48374 - RNA, 21 nt, Artificial Sequence
  RPE65 RNA guide
ucuuuuucucccuucgcagag

SEQ ID NO: 48375 - RNA, 21 nt, Artificial Sequence
  RPE65 RNA guide
ugaaaaacgcaugucuuuuuc

SEQ ID NO: 48376 - RNA, 21 nt, Artificial Sequence
  RPE65 RNA guide
ugaaaacaaaagauucuguga

SEQ ID NO: 48377 - RNA, 21 nt, Artificial Sequence
  RPE65 RNA guide
ugaaaacuaaucggguccaug

SEQ ID NO: 48378 - RNA, 21 nt, Artificial Sequence
  RPE65 RNA guide
ugaaaauaaagcaaccugcuu

SEQ ID NO: 48379 - RNA, 21 nt, Artificial Sequence
  RPE65 RNA guide
ugaaccccaccugaaaacaaa

SEQ ID NO: 48380 - RNA, 21 nt, Artificial Sequence
  RPE65 RNA guide
ugaacuuaaaguugacaaaau

SEQ ID NO: 48381 - RNA, 21 nt, Artificial Sequence
  RPE65 RNA guide
ugaaucacaucuaaaacagca

SEQ ID NO: 48382 - RNA, 21 nt, Artificial Sequence
  RPE65 RNA guide
ugacaggaagacagaacagaa

SEQ ID NO: 48383 - RNA, 21 nt, Artificial Sequence
  RPE65 RNA guide
ugaccugagaggugaacuuaa

SEQ ID NO: 48384 - RNA, 21 nt, Artificial Sequence
  RPE65 RNA guide
ugagaggugaacuuaaaguug

SEQ ID NO: 48385 - RNA, 21 nt, Artificial Sequence
  RPE65 RNA guide
ugagauacuuucuguucuguc

SEQ ID NO: 48386 - RNA, 21 nt, Artificial Sequence
  RPE65 RNA guide
ugagcacaggcaaugacaaau

SEQ ID NO: 48387 - RNA, 21 nt, Artificial Sequence
  RPE65 RNA guide
ugagccagguguaucagagcc

SEQ ID NO: 48388 - RNA, 21 nt, Artificial Sequence
  RPE65 RNA guide
ugagccccaucuucucugcga

SEQ ID NO: 48389 - RNA, 21 nt, Artificial Sequence
  RPE65 RNA guide
ugagugcagcagcucuguaaa

SEQ ID NO: 48390 - RNA, 21 nt, Artificial Sequence
  RPE65 RNA guide
ugauacaccuggcucaauagc

SEQ ID NO: 48391 - RNA, 21 nt, Artificial Sequence
  RPE65 RNA guide
ugauguucagauuaccuaaac

SEQ ID NO: 48392 - RNA, 21 nt, Artificial Sequence
  RPE65 RNA guide
ugauucagauugagugcagca

SEQ ID NO: 48393 - RNA, 21 nt, Artificial Sequence
  RPE65 RNA guide
ugauucuugccuuuuuaagca

SEQ ID NO: 48394 - RNA, 21 nt, Artificial Sequence
  RPE65 RNA guide
ugauugaaaacuaaucggguc

SEQ ID NO: 48395 - RNA, 21 nt, Artificial Sequence
  RPE65 RNA guide
ugauuuggcuagucugaaaaa

SEQ ID NO: 48396 - RNA, 21 nt, Artificial Sequence
  RPE65 RNA guide
ugcacucaaucugaaucacau

SEQ ID NO: 48397 - RNA, 21 nt, Artificial Sequence
  RPE65 RNA guide
ugcagcagcucuguaaaaacc

SEQ ID NO: 48398 - RNA, 21 nt, Artificial Sequence
  RPE65 RNA guide
ugccugccuguucuuuauucc

SEQ ID NO: 48399 - RNA, 21 nt, Artificial Sequence
  RPE65 RNA guide
ugccugugcucauguuugacu

SEQ ID NO: 48400 - RNA, 21 nt, Artificial Sequence
  RPE65 RNA guide
ugccuguucuuuauuccacaa

SEQ ID NO: 48401 - RNA, 21 nt, Artificial Sequence
  RPE65 RNA guide
ugccuuuuuaagcacaagugc

SEQ ID NO: 48402 - RNA, 21 nt, Artificial Sequence
  RPE65 RNA guide
ugcgaagggagaaaaagacau

SEQ ID NO: 48403 - RNA, 21 nt, Artificial Sequence
  RPE65 RNA guide
ugcguuuuucagacuagccaa

SEQ ID NO: 48404 - RNA, 21 nt, Artificial Sequence
  RPE65 RNA guide
ugcuauugagccagguguauc

SEQ ID NO: 48405 - RNA, 21 nt, Artificial Sequence
  RPE65 RNA guide
ugcugcacucaaucugaauca

SEQ ID NO: 48406 - RNA, 21 nt, Artificial Sequence
  RPE65 RNA guide
ugcuguugucuucuuagugau

SEQ ID NO: 48407 - RNA, 21 nt, Artificial Sequence
  RPE65 RNA guide
ugcuguuuuagaugugauuca

SEQ ID NO: 48408 - RNA, 21 nt, Artificial Sequence
  RPE65 RNA guide
ugcuuaaaaaggcaagaauca

SEQ ID NO: 48409 - RNA, 21 nt, Artificial Sequence
  RPE65 RNA guide
ugcuuuauuuucauccugugu

SEQ ID NO: 48410 - RNA, 21 nt, Artificial Sequence
  RPE65 RNA guide
uggaaaagcaguaggaaguuu

SEQ ID NO: 48411 - RNA, 21 nt, Artificial Sequence
  RPE65 RNA guide
uggaaauuacgggguuuuuac

SEQ ID NO: 48412 - RNA, 21 nt, Artificial Sequence
  RPE65 RNA guide
uggaauaaagaacaggcaggc

SEQ ID NO: 48413 - RNA, 21 nt, Artificial Sequence
  RPE65 RNA guide
uggacaaaugggacaccuccc

SEQ ID NO: 48414 - RNA, 21 nt, Artificial Sequence
  RPE65 RNA guide
uggacccgauuaguuuucaau

SEQ ID NO: 48415 - RNA, 21 nt, Artificial Sequence
  RPE65 RNA guide
uggauuuguuuaaguaacagc

SEQ ID NO: 48416 - RNA, 21 nt, Artificial Sequence
  RPE65 RNA guide
uggcuagucugaaaaacgcau

SEQ ID NO: 48417 - RNA, 21 nt, Artificial Sequence
  RPE65 RNA guide
uggcucaauagcaguuucugg

SEQ ID NO: 48418 - RNA, 21 nt, Artificial Sequence
  RPE65 RNA guide
uggcucugauacaccuggcuc

SEQ ID NO: 48419 - RNA, 21 nt, Artificial Sequence
  RPE65 RNA guide
ugggacaccucccauuguucc

SEQ ID NO: 48420 - RNA, 21 nt, Artificial Sequence
  RPE65 RNA guide
ugggaggugucccauuugucc

SEQ ID NO: 48421 - RNA, 21 nt, Artificial Sequence
  RPE65 RNA guide
ugggcgggaggaaauggcucu

SEQ ID NO: 48422 - RNA, 21 nt, Artificial Sequence
  RPE65 RNA guide
uggggaaacuugagccccauc

SEQ ID NO: 48423 - RNA, 21 nt, Artificial Sequence
  RPE65 RNA guide
ugggguucauggacccgauua

SEQ ID NO: 48424 - RNA, 21 nt, Artificial Sequence
  RPE65 RNA guide
uggguuguggaauaaagaaca

SEQ ID NO: 48425 - RNA, 21 nt, Artificial Sequence
  RPE65 RNA guide
uggugacaggaagacagaaca

SEQ ID NO: 48426 - RNA, 21 nt, Artificial Sequence
  RPE65 RNA guide
uguaaaaaccccguaauuucc

SEQ ID NO: 48427 - RNA, 21 nt, Artificial Sequence
  RPE65 RNA guide
uguaauuggaaaagcaguagg

SEQ ID NO: 48428 - RNA, 21 nt, Artificial Sequence
  RPE65 RNA guide
uguaucagagccauuuccucc

SEQ ID NO: 48429 - RNA, 21 nt, Artificial Sequence
  RPE65 RNA guide
ugucaacuuuaaguucaccuc

SEQ ID NO: 48430 - RNA, 21 nt, Artificial Sequence
  RPE65 RNA guide
ugucaccauucuguuuguguc

SEQ ID NO: 48431 - RNA, 21 nt, Artificial Sequence
  RPE65 RNA guide
ugucauugccugugcucaugu

SEQ ID NO: 48432 - RNA, 21 nt, Artificial Sequence
  RPE65 RNA guide
ugucccauuuguccagugucc

SEQ ID NO: 48433 - RNA, 21 nt, Artificial Sequence
  RPE65 RNA guide
ugucuuccugucaccauucug

SEQ ID NO: 48434 - RNA, 21 nt, Artificial Sequence
  RPE65 RNA guide
ugucuucuuagugauuuggcu

SEQ ID NO: 48435 - RNA, 21 nt, Artificial Sequence
  RPE65 RNA guide
ugucuuuuucucccuucgcag

SEQ ID NO: 48436 - RNA, 21 nt, Artificial Sequence
  RPE65 RNA guide
ugugaccugagaggugaacuu

SEQ ID NO: 48437 - RNA, 21 nt, Artificial Sequence
  RPE65 RNA guide
ugugagagucaaaaauguaau

SEQ ID NO: 48438 - RNA, 21 nt, Artificial Sequence
  RPE65 RNA guide
ugugauucagauugagugcag

SEQ ID NO: 48439 - RNA, 21 nt, Artificial Sequence
  RPE65 RNA guide
ugugcuuaaaaaggcaagaau

SEQ ID NO: 48440 - RNA, 21 nt, Artificial Sequence
  RPE65 RNA guide
uguggaauaaagaacaggcag

SEQ ID NO: 48441 - RNA, 21 nt, Artificial Sequence
  RPE65 RNA guide
ugugggcgggaggaaauggcu

SEQ ID NO: 48442 - RNA, 21 nt, Artificial Sequence
  RPE65 RNA guide
ugugugggcgggaggaaaugg

SEQ ID NO: 48443 - RNA, 21 nt, Artificial Sequence
  RPE65 RNA guide
uguucagauuaccuaaacuuc

SEQ ID NO: 48444 - RNA, 21 nt, Artificial Sequence
  RPE65 RNA guide
uguuccuggaaauuacggggu

SEQ ID NO: 48445 - RNA, 21 nt, Artificial Sequence
  RPE65 RNA guide
uguucugucuuccugucacca

SEQ ID NO: 48446 - RNA, 21 nt, Artificial Sequence
  RPE65 RNA guide
uguucuuuauuccacaaccca

SEQ ID NO: 48447 - RNA, 21 nt, Artificial Sequence
  RPE65 RNA guide
uguugucuucuuagugauuug

SEQ ID NO: 48448 - RNA, 21 nt, Artificial Sequence
  RPE65 RNA guide
uguuuaaguaacagcagccuu

SEQ ID NO: 48449 - RNA, 21 nt, Artificial Sequence
  RPE65 RNA guide
uguuuuagaugugauucagau

SEQ ID NO: 48450 - RNA, 21 nt, Artificial Sequence
  RPE65 RNA guide
uguuuucaggugggguucaug

SEQ ID NO: 48451 - RNA, 21 nt, Artificial Sequence
  RPE65 RNA guide
uuaaaaaggcaagaaucaucu

SEQ ID NO: 48452 - RNA, 21 nt, Artificial Sequence
  RPE65 RNA guide
uuaaacaaauccauuaagcag

SEQ ID NO: 48453 - RNA, 21 nt, Artificial Sequence
  RPE65 RNA guide
uuaagcacaagugccugccug

SEQ ID NO: 48454 - RNA, 21 nt, Artificial Sequence
  RPE65 RNA guide
uuaagcagguugcuuuauuuu

SEQ ID NO: 48455 - RNA, 21 nt, Artificial Sequence
  RPE65 RNA guide
uuaaguaacagcagccuugag

SEQ ID NO: 48456 - RNA, 21 nt, Artificial Sequence
  RPE65 RNA guide
uuaaguucaccucucagguca

SEQ ID NO: 48457 - RNA, 21 nt, Artificial Sequence
  RPE65 RNA guide
uuaaugauugaaaacuaaucg

SEQ ID NO: 48458 - RNA, 21 nt, Artificial Sequence
  RPE65 RNA guide
uuacagagcugcugcacucaa

SEQ ID NO: 48459 - RNA, 21 nt, Artificial Sequence
  RPE65 RNA guide
uuaccuaaacuuccuacugcu

SEQ ID NO: 48460 - RNA, 21 nt, Artificial Sequence
  RPE65 RNA guide
uuacgggguuuuuacagagcu

SEQ ID NO: 48461 - RNA, 21 nt, Artificial Sequence
  RPE65 RNA guide
uuagagagaugauucuugccu

SEQ ID NO: 48462 - RNA, 21 nt, Artificial Sequence
  RPE65 RNA guide
uuagaugugauucagauugag

SEQ ID NO: 48463 - RNA, 21 nt, Artificial Sequence
  RPE65 RNA guide
uuagugauuuggcuagucuga

SEQ ID NO: 48464 - RNA, 21 nt, Artificial Sequence
  RPE65 RNA guide
uuauuccacaacccagaaacu

SEQ ID NO: 48465 - RNA, 21 nt, Artificial Sequence
  RPE65 RNA guide
uuauuugucauugccugugcu

SEQ ID NO: 48466 - RNA, 21 nt, Artificial Sequence
  RPE65 RNA guide
uuauuuucauccugugugggc

SEQ ID NO: 48467 - RNA, 21 nt, Artificial Sequence
  RPE65 RNA guide
uucaccucucaggucacagaa

SEQ ID NO: 48468 - RNA, 21 nt, Artificial Sequence
  RPE65 RNA guide
uucagacuagccaaaucacua

SEQ ID NO: 48469 - RNA, 21 nt, Artificial Sequence
  RPE65 RNA guide
uucagauuaccuaaacuuccu

SEQ ID NO: 48470 - RNA, 21 nt, Artificial Sequence
  RPE65 RNA guide
uucagauugagugcagcagcu

SEQ ID NO: 48471 - RNA, 21 nt, Artificial Sequence
  RPE65 RNA guide
uucaggugggguucauggacc

SEQ ID NO: 48472 - RNA, 21 nt, Artificial Sequence
  RPE65 RNA guide
uucauccugugugggcgggag

SEQ ID NO: 48473 - RNA, 21 nt, Artificial Sequence
  RPE65 RNA guide
uucauggacccgauuaguuuu

SEQ ID NO: 48474 - RNA, 21 nt, Artificial Sequence
  RPE65 RNA guide
uuccaauuacauuuuugacuc

SEQ ID NO: 48475 - RNA, 21 nt, Artificial Sequence
  RPE65 RNA guide
uuccacaacccagaaacugcu

SEQ ID NO: 48476 - RNA, 21 nt, Artificial Sequence
  RPE65 RNA guide
uuccaggaacaaugggaggug

SEQ ID NO: 48477 - RNA, 21 nt, Artificial Sequence
  RPE65 RNA guide
uuccuacugcuuuuccaauua

SEQ ID NO: 48478 - RNA, 21 nt, Artificial Sequence
  RPE65 RNA guide
uuccucccgcccacacaggau

SEQ ID NO: 48479 - RNA, 21 nt, Artificial Sequence
  RPE65 RNA guide
uuccuggaaauuacgggguuu

SEQ ID NO: 48480 - RNA, 21 nt, Artificial Sequence
  RPE65 RNA guide
uuccugucaccauucuguuug

SEQ ID NO: 48481 - RNA, 21 nt, Artificial Sequence
  RPE65 RNA guide
uucgcagagaagauggggcuc

SEQ ID NO: 48482 - RNA, 21 nt, Artificial Sequence
  RPE65 RNA guide
uucucccuucgcagagaagau

SEQ ID NO: 48483 - RNA, 21 nt, Artificial Sequence
  RPE65 RNA guide
uucucugcgaagggagaaaaa

SEQ ID NO: 48484 - RNA, 21 nt, Artificial Sequence
  RPE65 RNA guide
uucuggguuguggaauaaaga

SEQ ID NO: 48485 - RNA, 21 nt, Artificial Sequence
  RPE65 RNA guide
uucugucuuccugucaccauu

SEQ ID NO: 48486 - RNA, 21 nt, Artificial Sequence
  RPE65 RNA guide
uucugugaccugagaggugaa

SEQ ID NO: 48487 - RNA, 21 nt, Artificial Sequence
  RPE65 RNA guide
uucuguucugucuuccuguca

SEQ ID NO: 48488 - RNA, 21 nt, Artificial Sequence
  RPE65 RNA guide
uucuuagugauuuggcuaguc

SEQ ID NO: 48489 - RNA, 21 nt, Artificial Sequence
  RPE65 RNA guide
uucuugccuuuuuaagcacaa

SEQ ID NO: 48490 - RNA, 21 nt, Artificial Sequence
  RPE65 RNA guide
uucuuuauuccacaacccaga

SEQ ID NO: 48491 - RNA, 21 nt, Artificial Sequence
  RPE65 RNA guide
uugaaaacuaaucggguccau

SEQ ID NO: 48492 - RNA, 21 nt, Artificial Sequence
  RPE65 RNA guide
uugagauacuuucuguucugu

SEQ ID NO: 48493 - RNA, 21 nt, Artificial Sequence
  RPE65 RNA guide
uugagccagguguaucagagc

SEQ ID NO: 48494 - RNA, 21 nt, Artificial Sequence
  RPE65 RNA guide
uugagccccaucuucucugcg

SEQ ID NO: 48495 - RNA, 21 nt, Artificial Sequence
  RPE65 RNA guide
uugagugcagcagcucuguaa

SEQ ID NO: 48496 - RNA, 21 nt, Artificial Sequence
  RPE65 RNA guide
uugauguucagauuaccuaaa

SEQ ID NO: 48497 - RNA, 21 nt, Artificial Sequence
  RPE65 RNA guide
uugccugugcucauguuugac

SEQ ID NO: 48498 - RNA, 21 nt, Artificial Sequence
  RPE65 RNA guide
uugccuuuuuaagcacaagug

SEQ ID NO: 48499 - RNA, 21 nt, Artificial Sequence
  RPE65 RNA guide
uugcuguuuuagaugugauuc

SEQ ID NO: 48500 - RNA, 21 nt, Artificial Sequence
  RPE65 RNA guide
uugcuuuauuuucauccugug

SEQ ID NO: 48501 - RNA, 21 nt, Artificial Sequence
  RPE65 RNA guide
uuggaaaagcaguaggaaguu

SEQ ID NO: 48502 - RNA, 21 nt, Artificial Sequence
  RPE65 RNA guide
uuggcuagucugaaaaacgca

SEQ ID NO: 48503 - RNA, 21 nt, Artificial Sequence
  RPE65 RNA guide
uugucaacuuuaaguucaccu

SEQ ID NO: 48504 - RNA, 21 nt, Artificial Sequence
  RPE65 RNA guide
uugucauugccugugcucaug

SEQ ID NO: 48505 - RNA, 21 nt, Artificial Sequence
  RPE65 RNA guide
uugucuucuuagugauuuggc

SEQ ID NO: 48506 - RNA, 21 nt, Artificial Sequence
  RPE65 RNA guide
uugugcuuaaaaaggcaagaa

SEQ ID NO: 48507 - RNA, 21 nt, Artificial Sequence
  RPE65 RNA guide
uuguggaauaaagaacaggca

SEQ ID NO: 48508 - RNA, 21 nt, Artificial Sequence
  RPE65 RNA guide
uuguuccuggaaauuacgggg

SEQ ID NO: 48509 - RNA, 21 nt, Artificial Sequence
  RPE65 RNA guide
uuguuuaaguaacagcagccu

SEQ ID NO: 48510 - RNA, 21 nt, Artificial Sequence
  RPE65 RNA guide
uuguuuucaggugggguucau

SEQ ID NO: 48511 - RNA, 21 nt, Artificial Sequence
  RPE65 RNA guide
uuuaagcacaagugccugccu

SEQ ID NO: 48512 - RNA, 21 nt, Artificial Sequence
  RPE65 RNA guide
uuuaaguaacagcagccuuga

SEQ ID NO: 48513 - RNA, 21 nt, Artificial Sequence
  RPE65 RNA guide
uuuaaguucaccucucagguc

SEQ ID NO: 48514 - RNA, 21 nt, Artificial Sequence
  RPE65 RNA guide
uuuacagagcugcugcacuca

SEQ ID NO: 48515 - RNA, 21 nt, Artificial Sequence
  RPE65 RNA guide
uuuagagagaugauucuugcc

SEQ ID NO: 48516 - RNA, 21 nt, Artificial Sequence
  RPE65 RNA guide
uuuagaugugauucagauuga

SEQ ID NO: 48517 - RNA, 21 nt, Artificial Sequence
  RPE65 RNA guide
uuuauuccacaacccagaaac

SEQ ID NO: 48518 - RNA, 21 nt, Artificial Sequence
  RPE65 RNA guide
uuuauuuucauccuguguggg

SEQ ID NO: 48519 - RNA, 21 nt, Artificial Sequence
  RPE65 RNA guide
uuucagacuagccaaaucacu

SEQ ID NO: 48520 - RNA, 21 nt, Artificial Sequence
  RPE65 RNA guide
uuucaggugggguucauggac

SEQ ID NO: 48521 - RNA, 21 nt, Artificial Sequence
  RPE65 RNA guide
uuucauccugugugggcggga

SEQ ID NO: 48522 - RNA, 21 nt, Artificial Sequence
  RPE65 RNA guide
uuuccaggaacaaugggaggu

SEQ ID NO: 48523 - RNA, 21 nt, Artificial Sequence
  RPE65 RNA guide
uuuccucccgcccacacagga

SEQ ID NO: 48524 - RNA, 21 nt, Artificial Sequence
  RPE65 RNA guide
uuucucccuucgcagagaaga

SEQ ID NO: 48525 - RNA, 21 nt, Artificial Sequence
  RPE65 RNA guide
uuucuggguuguggaauaaag

SEQ ID NO: 48526 - RNA, 21 nt, Artificial Sequence
  RPE65 RNA guide
uuucuguucugucuuccuguc

SEQ ID NO: 48527 - RNA, 21 nt, Artificial Sequence
  RPE65 RNA guide
uuuggcuagucugaaaaacgc

SEQ ID NO: 48528 - RNA, 21 nt, Artificial Sequence
  RPE65 RNA guide
uuugucaacuuuaaguucacc

SEQ ID NO: 48529 - RNA, 21 nt, Artificial Sequence
  RPE65 RNA guide
uuugucauugccugugcucau

SEQ ID NO: 48530 - RNA, 21 nt, Artificial Sequence
  RPE65 RNA guide
uuuguuuaaguaacagcagcc

SEQ ID NO: 48531 - RNA, 21 nt, Artificial Sequence
  RPE65 RNA guide
uuuguuuucaggugggguuca

SEQ ID NO: 48532 - RNA, 21 nt, Artificial Sequence
  RPE65 RNA guide
uuuuaagcacaagugccugcc

SEQ ID NO: 48533 - RNA, 21 nt, Artificial Sequence
  RPE65 RNA guide
uuuuacagagcugcugcacuc

SEQ ID NO: 48534 - RNA, 21 nt, Artificial Sequence
  RPE65 RNA guide
uuuuagagagaugauucuugc

SEQ ID NO: 48535 - RNA, 21 nt, Artificial Sequence
  RPE65 RNA guide
uuuuagaugugauucagauug

SEQ ID NO: 48536 - RNA, 21 nt, Artificial Sequence
  RPE65 RNA guide
uuuucagacuagccaaaucac

SEQ ID NO: 48537 - RNA, 21 nt, Artificial Sequence
  RPE65 RNA guide
uuuucaggugggguucaugga

SEQ ID NO: 48538 - RNA, 21 nt, Artificial Sequence
  RPE65 RNA guide
uuuucauccugugugggcggg

SEQ ID NO: 48539 - RNA, 21 nt, Artificial Sequence
  RPE65 RNA guide
uuuucucccuucgcagagaag

SEQ ID NO: 48540 - RNA, 21 nt, Artificial Sequence
  RPE65 RNA guide
uuuugucaacuuuaaguucac

SEQ ID NO: 48541 - RNA, 21 nt, Artificial Sequence
  RPE65 RNA guide
uuuuguuuucaggugggguuc

SEQ ID NO: 48542 - RNA, 21 nt, Artificial Sequence
  RPE65 RNA guide
uuuuuaagcacaagugccugc

SEQ ID NO: 48543 - RNA, 21 nt, Artificial Sequence
  RPE65 RNA guide
uuuuuacagagcugcugcacu

SEQ ID NO: 48544 - RNA, 21 nt, Artificial Sequence
  RPE65 RNA guide
uuuuucagacuagccaaauca

SEQ ID NO: 48545 - RNA, 21 nt, Artificial Sequence
  RPE65 RNA guide
uuuuucucccuucgcagagaa

SEQ ID NO: 48546 - RNA, 22 nt, Artificial Sequence
  RPE65 RNA guide
aaaaaccccguaauuuccagga

SEQ ID NO: 48547 - RNA, 22 nt, Artificial Sequence
  RPE65 RNA guide
aaaaacgcaugucuuuuucucc

SEQ ID NO: 48548 - RNA, 22 nt, Artificial Sequence
  RPE65 RNA guide
aaaaagacaugcguuuuucaga

SEQ ID NO: 48549 - RNA, 22 nt, Artificial Sequence
  RPE65 RNA guide
aaaaaggcaagaaucaucucuc

SEQ ID NO: 48550 - RNA, 22 nt, Artificial Sequence
  RPE65 RNA guide
aaaaagucaaacaugagcacag

SEQ ID NO: 48551 - RNA, 22 nt, Artificial Sequence
  RPE65 RNA guide
aaaaauguaauuggaaaagcag

SEQ ID NO: 48552 - RNA, 22 nt, Artificial Sequence
  RPE65 RNA guide
aaaacaaaagauucugugaccu

SEQ ID NO: 48553 - RNA, 22 nt, Artificial Sequence
  RPE65 RNA guide
aaaaccccguaauuuccaggaa

SEQ ID NO: 48554 - RNA, 22 nt, Artificial Sequence
  RPE65 RNA guide
aaaacgcaugucuuuuucuccc

SEQ ID NO: 48555 - RNA, 22 nt, Artificial Sequence
  RPE65 RNA guide
aaaacuaaucggguccaugaac

SEQ ID NO: 48556 - RNA, 22 nt, Artificial Sequence
  RPE65 RNA guide
aaaagacaugcguuuuucagac

SEQ ID NO: 48557 - RNA, 22 nt, Artificial Sequence
  RPE65 RNA guide
aaaagauucugugaccugagag

SEQ ID NO: 48558 - RNA, 22 nt, Artificial Sequence
  RPE65 RNA guide
aaaagcaguaggaaguuuaggu

SEQ ID NO: 48559 - RNA, 22 nt, Artificial Sequence
  RPE65 RNA guide
aaaaggcaagaaucaucucucu

SEQ ID NO: 48560 - RNA, 22 nt, Artificial Sequence
  RPE65 RNA guide
aaaagucaaacaugagcacagg

SEQ ID NO: 48561 - RNA, 22 nt, Artificial Sequence
  RPE65 RNA guide
aaaauaaagcaaccugcuuaau

SEQ ID NO: 48562 - RNA, 22 nt, Artificial Sequence
  RPE65 RNA guide
aaaauguaauuggaaaagcagu

SEQ ID NO: 48563 - RNA, 22 nt, Artificial Sequence
  RPE65 RNA guide
aaaauuauuugucauugccugu

SEQ ID NO: 48564 - RNA, 22 nt, Artificial Sequence
  RPE65 RNA guide
aaacaaaagauucugugaccug

SEQ ID NO: 48565 - RNA, 22 nt, Artificial Sequence
  RPE65 RNA guide
aaacaaauccauuaagcagguu

SEQ ID NO: 48566 - RNA, 22 nt, Artificial Sequence
  RPE65 RNA guide
aaacagaauggugacaggaaga

SEQ ID NO: 48567 - RNA, 22 nt, Artificial Sequence
  RPE65 RNA guide
aaacaugagcacaggcaaugac

SEQ ID NO: 48568 - RNA, 22 nt, Artificial Sequence
  RPE65 RNA guide
aaaccccguaauuuccaggaac

SEQ ID NO: 48569 - RNA, 22 nt, Artificial Sequence
  RPE65 RNA guide
aaacgcaugucuuuuucucccu

SEQ ID NO: 48570 - RNA, 22 nt, Artificial Sequence
  RPE65 RNA guide
aaacuaaucggguccaugaacc

SEQ ID NO: 48571 - RNA, 22 nt, Artificial Sequence
  RPE65 RNA guide
aaacugcuauugagccaggugu

SEQ ID NO: 48572 - RNA, 22 nt, Artificial Sequence
  RPE65 RNA guide
aaacuuccuacugcuuuuccaa

SEQ ID NO: 48573 - RNA, 22 nt, Artificial Sequence
  RPE65 RNA guide
aaacuugagccccaucuucucu

SEQ ID NO: 48574 - RNA, 22 nt, Artificial Sequence
  RPE65 RNA guide
aaagaacaggcaggcacuugug

SEQ ID NO: 48575 - RNA, 22 nt, Artificial Sequence
  RPE65 RNA guide
aaagacaugcguuuuucagacu

SEQ ID NO: 48576 - RNA, 22 nt, Artificial Sequence
  RPE65 RNA guide
aaagauucugugaccugagagg

SEQ ID NO: 48577 - RNA, 22 nt, Artificial Sequence
  RPE65 RNA guide
aaagcaaccugcuuaauggauu

SEQ ID NO: 48578 - RNA, 22 nt, Artificial Sequence
  RPE65 RNA guide
aaagcaguaggaaguuuaggua

SEQ ID NO: 48579 - RNA, 22 nt, Artificial Sequence
  RPE65 RNA guide
aaaggacacuggacaaauggga

SEQ ID NO: 48580 - RNA, 22 nt, Artificial Sequence
  RPE65 RNA guide
aaaggcaagaaucaucucucua

SEQ ID NO: 48581 - RNA, 22 nt, Artificial Sequence
  RPE65 RNA guide
aaaguaucucaaggcugcuguu

SEQ ID NO: 48582 - RNA, 22 nt, Artificial Sequence
  RPE65 RNA guide
aaagucaaacaugagcacaggc

SEQ ID NO: 48583 - RNA, 22 nt, Artificial Sequence
  RPE65 RNA guide
aaauaaaaagucaaacaugagc

SEQ ID NO: 48584 - RNA, 22 nt, Artificial Sequence
  RPE65 RNA guide
aaauaaagcaaccugcuuaaug

SEQ ID NO: 48585 - RNA, 22 nt, Artificial Sequence
  RPE65 RNA guide
aaauccauuaagcagguugcuu

SEQ ID NO: 48586 - RNA, 22 nt, Artificial Sequence
  RPE65 RNA guide
aaauggcucugauacaccuggc

SEQ ID NO: 48587 - RNA, 22 nt, Artificial Sequence
  RPE65 RNA guide
aaaugggacaccucccauuguu

SEQ ID NO: 48588 - RNA, 22 nt, Artificial Sequence
  RPE65 RNA guide
aaauguaauuggaaaagcagua

SEQ ID NO: 48589 - RNA, 22 nt, Artificial Sequence
  RPE65 RNA guide
aaauuacgggguuuuuacagag

SEQ ID NO: 48590 - RNA, 22 nt, Artificial Sequence
  RPE65 RNA guide
aaauuauuugucauugccugug

SEQ ID NO: 48591 - RNA, 22 nt, Artificial Sequence
  RPE65 RNA guide
aacaaaagauucugugaccuga

SEQ ID NO: 48592 - RNA, 22 nt, Artificial Sequence
  RPE65 RNA guide
aacaaauccauuaagcagguug

SEQ ID NO: 48593 - RNA, 22 nt, Artificial Sequence
  RPE65 RNA guide
aacaaugggaggugucccauuu

SEQ ID NO: 48594 - RNA, 22 nt, Artificial Sequence
  RPE65 RNA guide
aacagaaaguaucucaaggcug

SEQ ID NO: 48595 - RNA, 22 nt, Artificial Sequence
  RPE65 RNA guide
aacagaauggugacaggaagac

SEQ ID NO: 48596 - RNA, 22 nt, Artificial Sequence
  RPE65 RNA guide
aacagcagccuugagauacuuu

SEQ ID NO: 48597 - RNA, 22 nt, Artificial Sequence
  RPE65 RNA guide
aacaggcaggcacuugugcuua

SEQ ID NO: 48598 - RNA, 22 nt, Artificial Sequence
  RPE65 RNA guide
aacaugagcacaggcaaugaca

SEQ ID NO: 48599 - RNA, 22 nt, Artificial Sequence
  RPE65 RNA guide
aacccagaaacugcuauugagc

SEQ ID NO: 48600 - RNA, 22 nt, Artificial Sequence
  RPE65 RNA guide
aaccccaccugaaaacaaaaga

SEQ ID NO: 48601 - RNA, 22 nt, Artificial Sequence
  RPE65 RNA guide
aaccccguaauuuccaggaaca

SEQ ID NO: 48602 - RNA, 22 nt, Artificial Sequence
  RPE65 RNA guide
aaccugcuuaauggauuuguuu

SEQ ID NO: 48603 - RNA, 22 nt, Artificial Sequence
  RPE65 RNA guide
aacgcaugucuuuuucucccuu

SEQ ID NO: 48604 - RNA, 22 nt, Artificial Sequence
  RPE65 RNA guide
aacuaaucggguccaugaaccc

SEQ ID NO: 48605 - RNA, 22 nt, Artificial Sequence
  RPE65 RNA guide
aacucuugcuguuuuagaugug

SEQ ID NO: 48606 - RNA, 22 nt, Artificial Sequence
  RPE65 RNA guide
aacugcuauugagccaggugua

SEQ ID NO: 48607 - RNA, 22 nt, Artificial Sequence
  RPE65 RNA guide
aacuuccuacugcuuuuccaau

SEQ ID NO: 48608 - RNA, 22 nt, Artificial Sequence
  RPE65 RNA guide
aacuugagccccaucuucucug

SEQ ID NO: 48609 - RNA, 22 nt, Artificial Sequence
  RPE65 RNA guide
aacuuuaaguucaccucucagg

SEQ ID NO: 48610 - RNA, 22 nt, Artificial Sequence
  RPE65 RNA guide
aagaaaggacacuggacaaaug

SEQ ID NO: 48611 - RNA, 22 nt, Artificial Sequence
  RPE65 RNA guide
aagaacaggcaggcacuugugc

SEQ ID NO: 48612 - RNA, 22 nt, Artificial Sequence
  RPE65 RNA guide
aagacagaacagaaaguaucuc

SEQ ID NO: 48613 - RNA, 22 nt, Artificial Sequence
  RPE65 RNA guide
aagacaugcguuuuucagacua

SEQ ID NO: 48614 - RNA, 22 nt, Artificial Sequence
  RPE65 RNA guide
aagauucugugaccugagaggu

SEQ ID NO: 48615 - RNA, 22 nt, Artificial Sequence
  RPE65 RNA guide
aagcaaccugcuuaauggauuu

SEQ ID NO: 48616 - RNA, 22 nt, Artificial Sequence
  RPE65 RNA guide
aagcacaagugccugccuguuc

SEQ ID NO: 48617 - RNA, 22 nt, Artificial Sequence
  RPE65 RNA guide
aagcagguugcuuuauuuucau

SEQ ID NO: 48618 - RNA, 22 nt, Artificial Sequence
  RPE65 RNA guide
aagcaguaggaaguuuagguaa

SEQ ID NO: 48619 - RNA, 22 nt, Artificial Sequence
  RPE65 RNA guide
aaggacacaaacagaaugguga

SEQ ID NO: 48620 - RNA, 22 nt, Artificial Sequence
  RPE65 RNA guide
aaggacacuggacaaaugggac

SEQ ID NO: 48621 - RNA, 22 nt, Artificial Sequence
  RPE65 RNA guide
aaggcaagaaucaucucucuaa

SEQ ID NO: 48622 - RNA, 22 nt, Artificial Sequence
  RPE65 RNA guide
aaggcugcuguuacuuaaacaa

SEQ ID NO: 48623 - RNA, 22 nt, Artificial Sequence
  RPE65 RNA guide
aagggagaaaaagacaugcguu

SEQ ID NO: 48624 - RNA, 22 nt, Artificial Sequence
  RPE65 RNA guide
aaguaacagcagccuugagaua

SEQ ID NO: 48625 - RNA, 22 nt, Artificial Sequence
  RPE65 RNA guide
aaguaucucaaggcugcuguua

SEQ ID NO: 48626 - RNA, 22 nt, Artificial Sequence
  RPE65 RNA guide
aagucaaacaugagcacaggca

SEQ ID NO: 48627 - RNA, 22 nt, Artificial Sequence
  RPE65 RNA guide
aagugccugccuguucuuuauu

SEQ ID NO: 48628 - RNA, 22 nt, Artificial Sequence
  RPE65 RNA guide
aaguucaccucucaggucacag

SEQ ID NO: 48629 - RNA, 22 nt, Artificial Sequence
  RPE65 RNA guide
aauaaaaagucaaacaugagca

SEQ ID NO: 48630 - RNA, 22 nt, Artificial Sequence
  RPE65 RNA guide
aauaaagaacaggcaggcacuu

SEQ ID NO: 48631 - RNA, 22 nt, Artificial Sequence
  RPE65 RNA guide
aauaaagcaaccugcuuaaugg

SEQ ID NO: 48632 - RNA, 22 nt, Artificial Sequence
  RPE65 RNA guide
aauagcaguuucuggguugugg

SEQ ID NO: 48633 - RNA, 22 nt, Artificial Sequence
  RPE65 RNA guide
aaucacaucuaaaacagcaaga

SEQ ID NO: 48634 - RNA, 22 nt, Artificial Sequence
  RPE65 RNA guide
aauccauuaagcagguugcuuu

SEQ ID NO: 48635 - RNA, 22 nt, Artificial Sequence
  RPE65 RNA guide
aaucggguccaugaaccccacc

SEQ ID NO: 48636 - RNA, 22 nt, Artificial Sequence
  RPE65 RNA guide
aaucugaaucacaucuaaaaca

SEQ ID NO: 48637 - RNA, 22 nt, Artificial Sequence
  RPE65 RNA guide
aaucuuuuguuuucaggugggg

SEQ ID NO: 48638 - RNA, 22 nt, Artificial Sequence
  RPE65 RNA guide
aaugauugaaaacuaaucgggu

SEQ ID NO: 48639 - RNA, 22 nt, Artificial Sequence
  RPE65 RNA guide
aauggauuuguuuaaguaacag

SEQ ID NO: 48640 - RNA, 22 nt, Artificial Sequence
  RPE65 RNA guide
aauggcucugauacaccuggcu

SEQ ID NO: 48641 - RNA, 22 nt, Artificial Sequence
  RPE65 RNA guide
aaugggacaccucccauuguuc

SEQ ID NO: 48642 - RNA, 22 nt, Artificial Sequence
  RPE65 RNA guide
aaugggaggugucccauuuguc

SEQ ID NO: 48643 - RNA, 22 nt, Artificial Sequence
  RPE65 RNA guide
aauggugacaggaagacagaac

SEQ ID NO: 48644 - RNA, 22 nt, Artificial Sequence
  RPE65 RNA guide
aauguaauuggaaaagcaguag

SEQ ID NO: 48645 - RNA, 22 nt, Artificial Sequence
  RPE65 RNA guide
aauuacgggguuuuuacagagc

SEQ ID NO: 48646 - RNA, 22 nt, Artificial Sequence
  RPE65 RNA guide
aauuauuugucauugccugugc

SEQ ID NO: 48647 - RNA, 22 nt, Artificial Sequence
  RPE65 RNA guide
aauuggaaaagcaguaggaagu

SEQ ID NO: 48648 - RNA, 22 nt, Artificial Sequence
  RPE65 RNA guide
aauuuccaggaacaaugggagg

SEQ ID NO: 48649 - RNA, 22 nt, Artificial Sequence
  RPE65 RNA guide
aauuuuagagagaugauucuug

SEQ ID NO: 48650 - RNA, 22 nt, Artificial Sequence
  RPE65 RNA guide
acaaaagauucugugaccugag

SEQ ID NO: 48651 - RNA, 22 nt, Artificial Sequence
  RPE65 RNA guide
acaaacagaauggugacaggaa

SEQ ID NO: 48652 - RNA, 22 nt, Artificial Sequence
  RPE65 RNA guide
acaaauccauuaagcagguugc

SEQ ID NO: 48653 - RNA, 22 nt, Artificial Sequence
  RPE65 RNA guide
acaaaugggacaccucccauug

SEQ ID NO: 48654 - RNA, 22 nt, Artificial Sequence
  RPE65 RNA guide
acaacccagaaacugcuauuga

SEQ ID NO: 48655 - RNA, 22 nt, Artificial Sequence
  RPE65 RNA guide
acaagugccugccuguucuuua

SEQ ID NO: 48656 - RNA, 22 nt, Artificial Sequence
  RPE65 RNA guide
acaaugggaggugucccauuug

SEQ ID NO: 48657 - RNA, 22 nt, Artificial Sequence
  RPE65 RNA guide
acacaaacagaauggugacagg

SEQ ID NO: 48658 - RNA, 22 nt, Artificial Sequence
  RPE65 RNA guide
acacaggaugaaaauaaagcaa

SEQ ID NO: 48659 - RNA, 22 nt, Artificial Sequence
  RPE65 RNA guide
acaccucccauuguuccuggaa

SEQ ID NO: 48660 - RNA, 22 nt, Artificial Sequence
  RPE65 RNA guide
acaccuggcucaauagcaguuu

SEQ ID NO: 48661 - RNA, 22 nt, Artificial Sequence
  RPE65 RNA guide
acacuggacaaaugggacaccu

SEQ ID NO: 48662 - RNA, 22 nt, Artificial Sequence
  RPE65 RNA guide
acagaaaguaucucaaggcugc

SEQ ID NO: 48663 - RNA, 22 nt, Artificial Sequence
  RPE65 RNA guide
acagaacagaaaguaucucaag

SEQ ID NO: 48664 - RNA, 22 nt, Artificial Sequence
  RPE65 RNA guide
acagaaucuuuuguuuucaggu

SEQ ID NO: 48665 - RNA, 22 nt, Artificial Sequence
  RPE65 RNA guide
acagaauggugacaggaagaca

SEQ ID NO: 48666 - RNA, 22 nt, Artificial Sequence
  RPE65 RNA guide
acagagcugcugcacucaaucu

SEQ ID NO: 48667 - RNA, 22 nt, Artificial Sequence
  RPE65 RNA guide
acagcagccuugagauacuuuc

SEQ ID NO: 48668 - RNA, 22 nt, Artificial Sequence
  RPE65 RNA guide
acaggaagacagaacagaaagu

SEQ ID NO: 48669 - RNA, 22 nt, Artificial Sequence
  RPE65 RNA guide
acaggaugaaaauaaagcaacc

SEQ ID NO: 48670 - RNA, 22 nt, Artificial Sequence
  RPE65 RNA guide
acaggcaaugacaaauaauuuu

SEQ ID NO: 48671 - RNA, 22 nt, Artificial Sequence
  RPE65 RNA guide
acaggcaggcacuugugcuuaa

SEQ ID NO: 48672 - RNA, 22 nt, Artificial Sequence
  RPE65 RNA guide
acaugagcacaggcaaugacaa

SEQ ID NO: 48673 - RNA, 22 nt, Artificial Sequence
  RPE65 RNA guide
acaugcguuuuucagacuagcc

SEQ ID NO: 48674 - RNA, 22 nt, Artificial Sequence
  RPE65 RNA guide
acccagaaacugcuauugagcc

SEQ ID NO: 48675 - RNA, 22 nt, Artificial Sequence
  RPE65 RNA guide
accccaccugaaaacaaaagau

SEQ ID NO: 48676 - RNA, 22 nt, Artificial Sequence
  RPE65 RNA guide
accccguaauuuccaggaacaa

SEQ ID NO: 48677 - RNA, 22 nt, Artificial Sequence
  RPE65 RNA guide
acccgauuaguuuucaaucauu

SEQ ID NO: 48678 - RNA, 22 nt, Artificial Sequence
  RPE65 RNA guide
accuaaacuuccuacugcuuuu

SEQ ID NO: 48679 - RNA, 22 nt, Artificial Sequence
  RPE65 RNA guide
accuaaggacacaaacagaaug

SEQ ID NO: 48680 - RNA, 22 nt, Artificial Sequence
  RPE65 RNA guide
accucccauuguuccuggaaau

SEQ ID NO: 48681 - RNA, 22 nt, Artificial Sequence
  RPE65 RNA guide
accucucaggucacagaaucuu

SEQ ID NO: 48682 - RNA, 22 nt, Artificial Sequence
  RPE65 RNA guide
accugaaaacaaaagauucugu

SEQ ID NO: 48683 - RNA, 22 nt, Artificial Sequence
  RPE65 RNA guide
accugagaggugaacuuaaagu

SEQ ID NO: 48684 - RNA, 22 nt, Artificial Sequence
  RPE65 RNA guide
accugcuuaauggauuuguuua

SEQ ID NO: 48685 - RNA, 22 nt, Artificial Sequence
  RPE65 RNA guide
accuggcucaauagcaguuucu

SEQ ID NO: 48686 - RNA, 22 nt, Artificial Sequence
  RPE65 RNA guide
acgcaugucuuuuucucccuuc

SEQ ID NO: 48687 - RNA, 22 nt, Artificial Sequence
  RPE65 RNA guide
acgggguuuuuacagagcugcu

SEQ ID NO: 48688 - RNA, 22 nt, Artificial Sequence
  RPE65 RNA guide
acuaaucggguccaugaacccc

SEQ ID NO: 48689 - RNA, 22 nt, Artificial Sequence
  RPE65 RNA guide
acuagccaaaucacuaagaaga

SEQ ID NO: 48690 - RNA, 22 nt, Artificial Sequence
  RPE65 RNA guide
acucaaucugaaucacaucuaa

SEQ ID NO: 48691 - RNA, 22 nt, Artificial Sequence
  RPE65 RNA guide
acucuugcuguuuuagauguga

SEQ ID NO: 48692 - RNA, 22 nt, Artificial Sequence
  RPE65 RNA guide
acugcuauugagccagguguau

SEQ ID NO: 48693 - RNA, 22 nt, Artificial Sequence
  RPE65 RNA guide
acugcuuuuccaauuacauuuu

SEQ ID NO: 48694 - RNA, 22 nt, Artificial Sequence
  RPE65 RNA guide
acuggacaaaugggacaccucc

SEQ ID NO: 48695 - RNA, 22 nt, Artificial Sequence
  RPE65 RNA guide
acuuaaacaaauccauuaagca

SEQ ID NO: 48696 - RNA, 22 nt, Artificial Sequence
  RPE65 RNA guide
acuuccuacugcuuuuccaauu

SEQ ID NO: 48697 - RNA, 22 nt, Artificial Sequence
  RPE65 RNA guide
acuugagccccaucuucucugc

SEQ ID NO: 48698 - RNA, 22 nt, Artificial Sequence
  RPE65 RNA guide
acuugugcuuaaaaaggcaaga

SEQ ID NO: 48699 - RNA, 22 nt, Artificial Sequence
  RPE65 RNA guide
acuuuaaguucaccucucaggu

SEQ ID NO: 48700 - RNA, 22 nt, Artificial Sequence
  RPE65 RNA guide
acuuucuguucugucuuccugu

SEQ ID NO: 48701 - RNA, 22 nt, Artificial Sequence
  RPE65 RNA guide
agaaaaagacaugcguuuuuca

SEQ ID NO: 48702 - RNA, 22 nt, Artificial Sequence
  RPE65 RNA guide
agaaacugcuauugagccaggu

SEQ ID NO: 48703 - RNA, 22 nt, Artificial Sequence
  RPE65 RNA guide
agaaaggacacuggacaaaugg

SEQ ID NO: 48704 - RNA, 22 nt, Artificial Sequence
  RPE65 RNA guide
agaaaguaucucaaggcugcug

SEQ ID NO: 48705 - RNA, 22 nt, Artificial Sequence
  RPE65 RNA guide
agaacagaaaguaucucaaggc

SEQ ID NO: 48706 - RNA, 22 nt, Artificial Sequence
  RPE65 RNA guide
agaacaggcaggcacuugugcu

SEQ ID NO: 48707 - RNA, 22 nt, Artificial Sequence
  RPE65 RNA guide
agaagauggggcucaaguuucc

SEQ ID NO: 48708 - RNA, 22 nt, Artificial Sequence
  RPE65 RNA guide
agaaucuuuuguuuucaggugg

SEQ ID NO: 48709 - RNA, 22 nt, Artificial Sequence
  RPE65 RNA guide
agaauggugacaggaagacaga

SEQ ID NO: 48710 - RNA, 22 nt, Artificial Sequence
  RPE65 RNA guide
agacagaacagaaaguaucuca

SEQ ID NO: 48711 - RNA, 22 nt, Artificial Sequence
  RPE65 RNA guide
agacaugcguuuuucagacuag

SEQ ID NO: 48712 - RNA, 22 nt, Artificial Sequence
  RPE65 RNA guide
agacuagccaaaucacuaagaa

SEQ ID NO: 48713 - RNA, 22 nt, Artificial Sequence
  RPE65 RNA guide
agagaagauggggcucaaguuu

SEQ ID NO: 48714 - RNA, 22 nt, Artificial Sequence
  RPE65 RNA guide
agagagaugauucuugccuuuu

SEQ ID NO: 48715 - RNA, 22 nt, Artificial Sequence
  RPE65 RNA guide
agagaugauucuugccuuuuua

SEQ ID NO: 48716 - RNA, 22 nt, Artificial Sequence
  RPE65 RNA guide
agagccauuuccucccgcccac

SEQ ID NO: 48717 - RNA, 22 nt, Artificial Sequence
  RPE65 RNA guide
agagcugcugcacucaaucuga

SEQ ID NO: 48718 - RNA, 22 nt, Artificial Sequence
  RPE65 RNA guide
agaggugaacuuaaaguugaca

SEQ ID NO: 48719 - RNA, 22 nt, Artificial Sequence
  RPE65 RNA guide
agagucaaaaauguaauuggaa

SEQ ID NO: 48720 - RNA, 22 nt, Artificial Sequence
  RPE65 RNA guide
agauacuuucuguucugucuuc

SEQ ID NO: 48721 - RNA, 22 nt, Artificial Sequence
  RPE65 RNA guide
agaugauucuugccuuuuuaag

SEQ ID NO: 48722 - RNA, 22 nt, Artificial Sequence
  RPE65 RNA guide
agaugugauucagauugagugc

SEQ ID NO: 48723 - RNA, 22 nt, Artificial Sequence
  RPE65 RNA guide
agauuaccuaaacuuccuacug

SEQ ID NO: 48724 - RNA, 22 nt, Artificial Sequence
  RPE65 RNA guide
agauucugugaccugagaggug

SEQ ID NO: 48725 - RNA, 22 nt, Artificial Sequence
  RPE65 RNA guide
agauugagugcagcagcucugu

SEQ ID NO: 48726 - RNA, 22 nt, Artificial Sequence
  RPE65 RNA guide
agcaaccugcuuaauggauuug

SEQ ID NO: 48727 - RNA, 22 nt, Artificial Sequence
  RPE65 RNA guide
agcacaagugccugccuguucu

SEQ ID NO: 48728 - RNA, 22 nt, Artificial Sequence
  RPE65 RNA guide
agcacaggcaaugacaaauaau

SEQ ID NO: 48729 - RNA, 22 nt, Artificial Sequence
  RPE65 RNA guide
agcagccuugagauacuuucug

SEQ ID NO: 48730 - RNA, 22 nt, Artificial Sequence
  RPE65 RNA guide
agcagcucuguaaaaaccccgu

SEQ ID NO: 48731 - RNA, 22 nt, Artificial Sequence
  RPE65 RNA guide
agcagguugcuuuauuuucauc

SEQ ID NO: 48732 - RNA, 22 nt, Artificial Sequence
  RPE65 RNA guide
agcaguaggaaguuuagguaau

SEQ ID NO: 48733 - RNA, 22 nt, Artificial Sequence
  RPE65 RNA guide
agcaguuucuggguuguggaau

SEQ ID NO: 48734 - RNA, 22 nt, Artificial Sequence
  RPE65 RNA guide
agccaaaucacuaagaagacaa

SEQ ID NO: 48735 - RNA, 22 nt, Artificial Sequence
  RPE65 RNA guide
agccagguguaucagagccauu

SEQ ID NO: 48736 - RNA, 22 nt, Artificial Sequence
  RPE65 RNA guide
agccauuuccucccgcccacac

SEQ ID NO: 48737 - RNA, 22 nt, Artificial Sequence
  RPE65 RNA guide
agccccaucuucucugcgaagg

SEQ ID NO: 48738 - RNA, 22 nt, Artificial Sequence
  RPE65 RNA guide
agccuugagauacuuucuguuc

SEQ ID NO: 48739 - RNA, 22 nt, Artificial Sequence
  RPE65 RNA guide
agcucuguaaaaaccccguaau

SEQ ID NO: 48740 - RNA, 22 nt, Artificial Sequence
  RPE65 RNA guide
agcugcugcacucaaucugaau

SEQ ID NO: 48741 - RNA, 22 nt, Artificial Sequence
  RPE65 RNA guide
aggaaauggcucugauacaccu

SEQ ID NO: 48742 - RNA, 22 nt, Artificial Sequence
  RPE65 RNA guide
aggaacaaugggagguguccca

SEQ ID NO: 48743 - RNA, 22 nt, Artificial Sequence
  RPE65 RNA guide
aggaagacagaacagaaaguau

SEQ ID NO: 48744 - RNA, 22 nt, Artificial Sequence
  RPE65 RNA guide
aggaaguuuagguaaucugaac

SEQ ID NO: 48745 - RNA, 22 nt, Artificial Sequence
  RPE65 RNA guide
aggacacaaacagaauggugac

SEQ ID NO: 48746 - RNA, 22 nt, Artificial Sequence
  RPE65 RNA guide
aggacacuggacaaaugggaca

SEQ ID NO: 48747 - RNA, 22 nt, Artificial Sequence
  RPE65 RNA guide
aggaugaaaauaaagcaaccug

SEQ ID NO: 48748 - RNA, 22 nt, Artificial Sequence
  RPE65 RNA guide
aggcaagaaucaucucucuaaa

SEQ ID NO: 48749 - RNA, 22 nt, Artificial Sequence
  RPE65 RNA guide
aggcaaugacaaauaauuuuag

SEQ ID NO: 48750 - RNA, 22 nt, Artificial Sequence
  RPE65 RNA guide
aggcacuugugcuuaaaaaggc

SEQ ID NO: 48751 - RNA, 22 nt, Artificial Sequence
  RPE65 RNA guide
aggcaggcacuugugcuuaaaa

SEQ ID NO: 48752 - RNA, 22 nt, Artificial Sequence
  RPE65 RNA guide
aggcugcuguuacuuaaacaaa

SEQ ID NO: 48753 - RNA, 22 nt, Artificial Sequence
  RPE65 RNA guide
agggagaaaaagacaugcguuu

SEQ ID NO: 48754 - RNA, 22 nt, Artificial Sequence
  RPE65 RNA guide
agguaaucugaacaucaaaacu

SEQ ID NO: 48755 - RNA, 22 nt, Artificial Sequence
  RPE65 RNA guide
aggucacagaaucuuuuguuuu

SEQ ID NO: 48756 - RNA, 22 nt, Artificial Sequence
  RPE65 RNA guide
aggugggguucauggacccgau

SEQ ID NO: 48757 - RNA, 22 nt, Artificial Sequence
  RPE65 RNA guide
agguguaucagagccauuuccu

SEQ ID NO: 48758 - RNA, 22 nt, Artificial Sequence
  RPE65 RNA guide
aggugucccauuuguccagugu

SEQ ID NO: 48759 - RNA, 22 nt, Artificial Sequence
  RPE65 RNA guide
agguugcuuuauuuucauccug

SEQ ID NO: 48760 - RNA, 22 nt, Artificial Sequence
  RPE65 RNA guide
aguaacagcagccuugagauac

SEQ ID NO: 48761 - RNA, 22 nt, Artificial Sequence
  RPE65 RNA guide
aguaggaaguuuagguaaucug

SEQ ID NO: 48762 - RNA, 22 nt, Artificial Sequence
  RPE65 RNA guide
aguaucucaaggcugcuguuac

SEQ ID NO: 48763 - RNA, 22 nt, Artificial Sequence
  RPE65 RNA guide
agucaaaaauguaauuggaaaa

SEQ ID NO: 48764 - RNA, 22 nt, Artificial Sequence
  RPE65 RNA guide
agucaaacaugagcacaggcaa

SEQ ID NO: 48765 - RNA, 22 nt, Artificial Sequence
  RPE65 RNA guide
agucugaaaaacgcaugucuuu

SEQ ID NO: 48766 - RNA, 22 nt, Artificial Sequence
  RPE65 RNA guide
agugauuuggcuagucugaaaa

SEQ ID NO: 48767 - RNA, 22 nt, Artificial Sequence
  RPE65 RNA guide
agugcagcagcucuguaaaaac

SEQ ID NO: 48768 - RNA, 22 nt, Artificial Sequence
  RPE65 RNA guide
agugccugccuguucuuuauuc

SEQ ID NO: 48769 - RNA, 22 nt, Artificial Sequence
  RPE65 RNA guide
aguucaccucucaggucacaga

SEQ ID NO: 48770 - RNA, 22 nt, Artificial Sequence
  RPE65 RNA guide
aguuuagguaaucugaacauca

SEQ ID NO: 48771 - RNA, 22 nt, Artificial Sequence
  RPE65 RNA guide
aguuucuggguuguggaauaaa

SEQ ID NO: 48772 - RNA, 22 nt, Artificial Sequence
  RPE65 RNA guide
aguuuugauguucagauuaccu

SEQ ID NO: 48773 - RNA, 22 nt, Artificial Sequence
  RPE65 RNA guide
auaaaaagucaaacaugagcac

SEQ ID NO: 48774 - RNA, 22 nt, Artificial Sequence
  RPE65 RNA guide
auaaagaacaggcaggcacuug

SEQ ID NO: 48775 - RNA, 22 nt, Artificial Sequence
  RPE65 RNA guide
auaaagcaaccugcuuaaugga

SEQ ID NO: 48776 - RNA, 22 nt, Artificial Sequence
  RPE65 RNA guide
auaacucuugcuguuuuagaug

SEQ ID NO: 48777 - RNA, 22 nt, Artificial Sequence
  RPE65 RNA guide
auaauuuuagagagaugauucu

SEQ ID NO: 48778 - RNA, 22 nt, Artificial Sequence
  RPE65 RNA guide
auacaccuggcucaauagcagu

SEQ ID NO: 48779 - RNA, 22 nt, Artificial Sequence
  RPE65 RNA guide
auacuuucuguucugucuuccu

SEQ ID NO: 48780 - RNA, 22 nt, Artificial Sequence
  RPE65 RNA guide
auagcaguuucuggguugugga

SEQ ID NO: 48781 - RNA, 22 nt, Artificial Sequence
  RPE65 RNA guide
aucagagccauuuccucccgcc

SEQ ID NO: 48782 - RNA, 22 nt, Artificial Sequence
  RPE65 RNA guide
aucauaguuuugauguucagau

SEQ ID NO: 48783 - RNA, 22 nt, Artificial Sequence
  RPE65 RNA guide
auccauuaagcagguugcuuua

SEQ ID NO: 48784 - RNA, 22 nt, Artificial Sequence
  RPE65 RNA guide
auccugugugggcgggaggaaa

SEQ ID NO: 48785 - RNA, 22 nt, Artificial Sequence
  RPE65 RNA guide
aucggguccaugaaccccaccu

SEQ ID NO: 48786 - RNA, 22 nt, Artificial Sequence
  RPE65 RNA guide
aucucaaggcugcuguuacuua

SEQ ID NO: 48787 - RNA, 22 nt, Artificial Sequence
  RPE65 RNA guide
aucugaaucacaucuaaaacag

SEQ ID NO: 48788 - RNA, 22 nt, Artificial Sequence
  RPE65 RNA guide
aucuucucugcgaagggagaaa

SEQ ID NO: 48789 - RNA, 22 nt, Artificial Sequence
  RPE65 RNA guide
aucuuuuguuuucagguggggu

SEQ ID NO: 48790 - RNA, 22 nt, Artificial Sequence
  RPE65 RNA guide
augaaaauaaagcaaccugcuu

SEQ ID NO: 48791 - RNA, 22 nt, Artificial Sequence
  RPE65 RNA guide
augaaccccaccugaaaacaaa

SEQ ID NO: 48792 - RNA, 22 nt, Artificial Sequence
  RPE65 RNA guide
augagcacaggcaaugacaaau

SEQ ID NO: 48793 - RNA, 22 nt, Artificial Sequence
  RPE65 RNA guide
augauucuugccuuuuuaagca

SEQ ID NO: 48794 - RNA, 22 nt, Artificial Sequence
  RPE65 RNA guide
augauugaaaacuaaucggguc

SEQ ID NO: 48795 - RNA, 22 nt, Artificial Sequence
  RPE65 RNA guide
augcguuuuucagacuagccaa

SEQ ID NO: 48796 - RNA, 22 nt, Artificial Sequence
  RPE65 RNA guide
auggacccgauuaguuuucaau

SEQ ID NO: 48797 - RNA, 22 nt, Artificial Sequence
  RPE65 RNA guide
auggauuuguuuaaguaacagc

SEQ ID NO: 48798 - RNA, 22 nt, Artificial Sequence
  RPE65 RNA guide
auggcucugauacaccuggcuc

SEQ ID NO: 48799 - RNA, 22 nt, Artificial Sequence
  RPE65 RNA guide
augggacaccucccauuguucc

SEQ ID NO: 48800 - RNA, 22 nt, Artificial Sequence
  RPE65 RNA guide
augggaggugucccauuugucc

SEQ ID NO: 48801 - RNA, 22 nt, Artificial Sequence
  RPE65 RNA guide
auggugacaggaagacagaaca

SEQ ID NO: 48802 - RNA, 22 nt, Artificial Sequence
  RPE65 RNA guide
auguaauuggaaaagcaguagg

SEQ ID NO: 48803 - RNA, 22 nt, Artificial Sequence
  RPE65 RNA guide
augucuuuuucucccuucgcag

SEQ ID NO: 48804 - RNA, 22 nt, Artificial Sequence
  RPE65 RNA guide
augugagagucaaaaauguaau

SEQ ID NO: 48805 - RNA, 22 nt, Artificial Sequence
  RPE65 RNA guide
augugauucagauugagugcag

SEQ ID NO: 48806 - RNA, 22 nt, Artificial Sequence
  RPE65 RNA guide
auguucagauuaccuaaacuuc

SEQ ID NO: 48807 - RNA, 22 nt, Artificial Sequence
  RPE65 RNA guide
auuaagcagguugcuuuauuuu

SEQ ID NO: 48808 - RNA, 22 nt, Artificial Sequence
  RPE65 RNA guide
auuaaugauugaaaacuaaucg

SEQ ID NO: 48809 - RNA, 22 nt, Artificial Sequence
  RPE65 RNA guide
auuaccuaaacuuccuacugcu

SEQ ID NO: 48810 - RNA, 22 nt, Artificial Sequence
  RPE65 RNA guide
auuacgggguuuuuacagagcu

SEQ ID NO: 48811 - RNA, 22 nt, Artificial Sequence
  RPE65 RNA guide
auuauuugucauugccugugcu

SEQ ID NO: 48812 - RNA, 22 nt, Artificial Sequence
  RPE65 RNA guide
auucagauugagugcagcagcu

SEQ ID NO: 48813 - RNA, 22 nt, Artificial Sequence
  RPE65 RNA guide
auuccacaacccagaaacugcu

SEQ ID NO: 48814 - RNA, 22 nt, Artificial Sequence
  RPE65 RNA guide
auucugugaccugagaggugaa

SEQ ID NO: 48815 - RNA, 22 nt, Artificial Sequence
  RPE65 RNA guide
auucuugccuuuuuaagcacaa

SEQ ID NO: 48816 - RNA, 22 nt, Artificial Sequence
  RPE65 RNA guide
auugaaaacuaaucggguccau

SEQ ID NO: 48817 - RNA, 22 nt, Artificial Sequence
  RPE65 RNA guide
auugagccagguguaucagagc

SEQ ID NO: 48818 - RNA, 22 nt, Artificial Sequence
  RPE65 RNA guide
auugagugcagcagcucuguaa

SEQ ID NO: 48819 - RNA, 22 nt, Artificial Sequence
  RPE65 RNA guide
auugccugugcucauguuugac

SEQ ID NO: 48820 - RNA, 22 nt, Artificial Sequence
  RPE65 RNA guide
auuggaaaagcaguaggaaguu

SEQ ID NO: 48821 - RNA, 22 nt, Artificial Sequence
  RPE65 RNA guide
auuguuccuggaaauuacgggg

SEQ ID NO: 48822 - RNA, 22 nt, Artificial Sequence
  RPE65 RNA guide
auuuccaggaacaaugggaggu

SEQ ID NO: 48823 - RNA, 22 nt, Artificial Sequence
  RPE65 RNA guide
auuuccucccgcccacacagga

SEQ ID NO: 48824 - RNA, 22 nt, Artificial Sequence
  RPE65 RNA guide
auuuggcuagucugaaaaacgc

SEQ ID NO: 48825 - RNA, 22 nt, Artificial Sequence
  RPE65 RNA guide
auuugucauugccugugcucau

SEQ ID NO: 48826 - RNA, 22 nt, Artificial Sequence
  RPE65 RNA guide
auuuguuuaaguaacagcagcc

SEQ ID NO: 48827 - RNA, 22 nt, Artificial Sequence
  RPE65 RNA guide
auuuuagagagaugauucuugc

SEQ ID NO: 48828 - RNA, 22 nt, Artificial Sequence
  RPE65 RNA guide
auuuucauccugugugggcggg

SEQ ID NO: 48829 - RNA, 22 nt, Artificial Sequence
  RPE65 RNA guide
auuuugucaacuuuaaguucac

SEQ ID NO: 48830 - RNA, 22 nt, Artificial Sequence
  RPE65 RNA guide
caaaaauguaauuggaaaagca

SEQ ID NO: 48831 - RNA, 22 nt, Artificial Sequence
  RPE65 RNA guide
caaaagauucugugaccugaga

SEQ ID NO: 48832 - RNA, 22 nt, Artificial Sequence
  RPE65 RNA guide
caaacagaauggugacaggaag

SEQ ID NO: 48833 - RNA, 22 nt, Artificial Sequence
  RPE65 RNA guide
caaacaugagcacaggcaauga

SEQ ID NO: 48834 - RNA, 22 nt, Artificial Sequence
  RPE65 RNA guide
caaauccauuaagcagguugcu

SEQ ID NO: 48835 - RNA, 22 nt, Artificial Sequence
  RPE65 RNA guide
caaaugggacaccucccauugu

SEQ ID NO: 48836 - RNA, 22 nt, Artificial Sequence
  RPE65 RNA guide
caacccagaaacugcuauugag

SEQ ID NO: 48837 - RNA, 22 nt, Artificial Sequence
  RPE65 RNA guide
caaccugcuuaauggauuuguu

SEQ ID NO: 48838 - RNA, 22 nt, Artificial Sequence
  RPE65 RNA guide
caacuuuaaguucaccucucag

SEQ ID NO: 48839 - RNA, 22 nt, Artificial Sequence
  RPE65 RNA guide
caaggcugcuguuacuuaaaca

SEQ ID NO: 48840 - RNA, 22 nt, Artificial Sequence
  RPE65 RNA guide
caagugccugccuguucuuuau

SEQ ID NO: 48841 - RNA, 22 nt, Artificial Sequence
  RPE65 RNA guide
caauagcaguuucuggguugug

SEQ ID NO: 48842 - RNA, 22 nt, Artificial Sequence
  RPE65 RNA guide
caaucugaaucacaucuaaaac

SEQ ID NO: 48843 - RNA, 22 nt, Artificial Sequence
  RPE65 RNA guide
caaugggaggugucccauuugu

SEQ ID NO: 48844 - RNA, 22 nt, Artificial Sequence
  RPE65 RNA guide
cacaaacagaauggugacagga

SEQ ID NO: 48845 - RNA, 22 nt, Artificial Sequence
  RPE65 RNA guide
cacaacccagaaacugcuauug

SEQ ID NO: 48846 - RNA, 22 nt, Artificial Sequence
  RPE65 RNA guide
cacaagugccugccuguucuuu

SEQ ID NO: 48847 - RNA, 22 nt, Artificial Sequence
  RPE65 RNA guide
cacacaggaugaaaauaaagca

SEQ ID NO: 48848 - RNA, 22 nt, Artificial Sequence
  RPE65 RNA guide
cacagaaucuuuuguuuucagg

SEQ ID NO: 48849 - RNA, 22 nt, Artificial Sequence
  RPE65 RNA guide
cacaggaugaaaauaaagcaac

SEQ ID NO: 48850 - RNA, 22 nt, Artificial Sequence
  RPE65 RNA guide
cacaggcaaugacaaauaauuu

SEQ ID NO: 48851 - RNA, 22 nt, Artificial Sequence
  RPE65 RNA guide
caccucccauuguuccuggaaa

SEQ ID NO: 48852 - RNA, 22 nt, Artificial Sequence
  RPE65 RNA guide
caccucucaggucacagaaucu

SEQ ID NO: 48853 - RNA, 22 nt, Artificial Sequence
  RPE65 RNA guide
caccugaaaacaaaagauucug

SEQ ID NO: 48854 - RNA, 22 nt, Artificial Sequence
  RPE65 RNA guide
caccuggcucaauagcaguuuc

SEQ ID NO: 48855 - RNA, 22 nt, Artificial Sequence
  RPE65 RNA guide
cacucaaucugaaucacaucua

SEQ ID NO: 48856 - RNA, 22 nt, Artificial Sequence
  RPE65 RNA guide
cacuggacaaaugggacaccuc

SEQ ID NO: 48857 - RNA, 22 nt, Artificial Sequence
  RPE65 RNA guide
cacuugugcuuaaaaaggcaag

SEQ ID NO: 48858 - RNA, 22 nt, Artificial Sequence
  RPE65 RNA guide
cagaaacugcuauugagccagg

SEQ ID NO: 48859 - RNA, 22 nt, Artificial Sequence
  RPE65 RNA guide
cagaaaguaucucaaggcugcu

SEQ ID NO: 48860 - RNA, 22 nt, Artificial Sequence
  RPE65 RNA guide
cagaacagaaaguaucucaagg

SEQ ID NO: 48861 - RNA, 22 nt, Artificial Sequence
  RPE65 RNA guide
cagaaucuuuuguuuucaggug

SEQ ID NO: 48862 - RNA, 22 nt, Artificial Sequence
  RPE65 RNA guide
cagaauggugacaggaagacag

SEQ ID NO: 48863 - RNA, 22 nt, Artificial Sequence
  RPE65 RNA guide
cagacuagccaaaucacuaaga

SEQ ID NO: 48864 - RNA, 22 nt, Artificial Sequence
  RPE65 RNA guide
cagagaagauggggcucaaguu

SEQ ID NO: 48865 - RNA, 22 nt, Artificial Sequence
  RPE65 RNA guide
cagagccauuuccucccgccca

SEQ ID NO: 48866 - RNA, 22 nt, Artificial Sequence
  RPE65 RNA guide
cagagcugcugcacucaaucug

SEQ ID NO: 48867 - RNA, 22 nt, Artificial Sequence
  RPE65 RNA guide
cagauuaccuaaacuuccuacu

SEQ ID NO: 48868 - RNA, 22 nt, Artificial Sequence
  RPE65 RNA guide
cagauugagugcagcagcucug

SEQ ID NO: 48869 - RNA, 22 nt, Artificial Sequence
  RPE65 RNA guide
cagcagccuugagauacuuucu

SEQ ID NO: 48870 - RNA, 22 nt, Artificial Sequence
  RPE65 RNA guide
cagcagcucuguaaaaaccccg

SEQ ID NO: 48871 - RNA, 22 nt, Artificial Sequence
  RPE65 RNA guide
cagccuugagauacuuucuguu

SEQ ID NO: 48872 - RNA, 22 nt, Artificial Sequence
  RPE65 RNA guide
cagcucuguaaaaaccccguaa

SEQ ID NO: 48873 - RNA, 22 nt, Artificial Sequence
  RPE65 RNA guide
caggaacaaugggagguguccc

SEQ ID NO: 48874 - RNA, 22 nt, Artificial Sequence
  RPE65 RNA guide
caggaagacagaacagaaagua

SEQ ID NO: 48875 - RNA, 22 nt, Artificial Sequence
  RPE65 RNA guide
caggaugaaaauaaagcaaccu

SEQ ID NO: 48876 - RNA, 22 nt, Artificial Sequence
  RPE65 RNA guide
caggcaaugacaaauaauuuua

SEQ ID NO: 48877 - RNA, 22 nt, Artificial Sequence
  RPE65 RNA guide
caggcacuugugcuuaaaaagg

SEQ ID NO: 48878 - RNA, 22 nt, Artificial Sequence
  RPE65 RNA guide
caggcaggcacuugugcuuaaa

SEQ ID NO: 48879 - RNA, 22 nt, Artificial Sequence
  RPE65 RNA guide
caggucacagaaucuuuuguuu

SEQ ID NO: 48880 - RNA, 22 nt, Artificial Sequence
  RPE65 RNA guide
caggugggguucauggacccga

SEQ ID NO: 48881 - RNA, 22 nt, Artificial Sequence
  RPE65 RNA guide
cagguguaucagagccauuucc

SEQ ID NO: 48882 - RNA, 22 nt, Artificial Sequence
  RPE65 RNA guide
cagguugcuuuauuuucauccu

SEQ ID NO: 48883 - RNA, 22 nt, Artificial Sequence
  RPE65 RNA guide
caguaggaaguuuagguaaucu

SEQ ID NO: 48884 - RNA, 22 nt, Artificial Sequence
  RPE65 RNA guide
caguuucuggguuguggaauaa

SEQ ID NO: 48885 - RNA, 22 nt, Artificial Sequence
  RPE65 RNA guide
cauaguuuugauguucagauua

SEQ ID NO: 48886 - RNA, 22 nt, Artificial Sequence
  RPE65 RNA guide
cauccugugugggcgggaggaa

SEQ ID NO: 48887 - RNA, 22 nt, Artificial Sequence
  RPE65 RNA guide
caucuucucugcgaagggagaa

SEQ ID NO: 48888 - RNA, 22 nt, Artificial Sequence
  RPE65 RNA guide
caugaaccccaccugaaaacaa

SEQ ID NO: 48889 - RNA, 22 nt, Artificial Sequence
  RPE65 RNA guide
caugagcacaggcaaugacaaa

SEQ ID NO: 48890 - RNA, 22 nt, Artificial Sequence
  RPE65 RNA guide
caugcguuuuucagacuagcca

SEQ ID NO: 48891 - RNA, 22 nt, Artificial Sequence
  RPE65 RNA guide
cauggacccgauuaguuuucaa

SEQ ID NO: 48892 - RNA, 22 nt, Artificial Sequence
  RPE65 RNA guide
caugucuuuuucucccuucgca

SEQ ID NO: 48893 - RNA, 22 nt, Artificial Sequence
  RPE65 RNA guide
cauuaagcagguugcuuuauuu

SEQ ID NO: 48894 - RNA, 22 nt, Artificial Sequence
  RPE65 RNA guide
cauugccugugcucauguuuga

SEQ ID NO: 48895 - RNA, 22 nt, Artificial Sequence
  RPE65 RNA guide
cauuguuccuggaaauuacggg

SEQ ID NO: 48896 - RNA, 22 nt, Artificial Sequence
  RPE65 RNA guide
cauuuccucccgcccacacagg

SEQ ID NO: 48897 - RNA, 22 nt, Artificial Sequence
  RPE65 RNA guide
ccacaacccagaaacugcuauu

SEQ ID NO: 48898 - RNA, 22 nt, Artificial Sequence
  RPE65 RNA guide
ccacacaggaugaaaauaaagc

SEQ ID NO: 48899 - RNA, 22 nt, Artificial Sequence
  RPE65 RNA guide
ccaccugaaaacaaaagauucu

SEQ ID NO: 48900 - RNA, 22 nt, Artificial Sequence
  RPE65 RNA guide
ccagaaacugcuauugagccag

SEQ ID NO: 48901 - RNA, 22 nt, Artificial Sequence
  RPE65 RNA guide
ccaggaacaaugggaggugucc

SEQ ID NO: 48902 - RNA, 22 nt, Artificial Sequence
  RPE65 RNA guide
ccagguguaucagagccauuuc

SEQ ID NO: 48903 - RNA, 22 nt, Artificial Sequence
  RPE65 RNA guide
ccaucuucucugcgaagggaga

SEQ ID NO: 48904 - RNA, 22 nt, Artificial Sequence
  RPE65 RNA guide
ccaugaaccccaccugaaaaca

SEQ ID NO: 48905 - RNA, 22 nt, Artificial Sequence
  RPE65 RNA guide
ccauuaagcagguugcuuuauu

SEQ ID NO: 48906 - RNA, 22 nt, Artificial Sequence
  RPE65 RNA guide
ccauuguuccuggaaauuacgg

SEQ ID NO: 48907 - RNA, 22 nt, Artificial Sequence
  RPE65 RNA guide
ccauuuccucccgcccacacag

SEQ ID NO: 48908 - RNA, 22 nt, Artificial Sequence
  RPE65 RNA guide
cccacacaggaugaaaauaaag

SEQ ID NO: 48909 - RNA, 22 nt, Artificial Sequence
  RPE65 RNA guide
cccaccugaaaacaaaagauuc

SEQ ID NO: 48910 - RNA, 22 nt, Artificial Sequence
  RPE65 RNA guide
cccagaaacugcuauugagcca

SEQ ID NO: 48911 - RNA, 22 nt, Artificial Sequence
  RPE65 RNA guide
cccaucuucucugcgaagggag

SEQ ID NO: 48912 - RNA, 22 nt, Artificial Sequence
  RPE65 RNA guide
cccauuguuccuggaaauuacg

SEQ ID NO: 48913 - RNA, 22 nt, Artificial Sequence
  RPE65 RNA guide
cccauuuguccaguguccuuuc

SEQ ID NO: 48914 - RNA, 22 nt, Artificial Sequence
  RPE65 RNA guide
ccccaccugaaaacaaaagauu

SEQ ID NO: 48915 - RNA, 22 nt, Artificial Sequence
  RPE65 RNA guide
ccccaucuucucugcgaaggga

SEQ ID NO: 48916 - RNA, 22 nt, Artificial Sequence
  RPE65 RNA guide
ccccguaauuuccaggaacaau

SEQ ID NO: 48917 - RNA, 22 nt, Artificial Sequence
  RPE65 RNA guide
cccgauuaguuuucaaucauua

SEQ ID NO: 48918 - RNA, 22 nt, Artificial Sequence
  RPE65 RNA guide
cccgcccacacaggaugaaaau

SEQ ID NO: 48919 - RNA, 22 nt, Artificial Sequence
  RPE65 RNA guide
cccguaauuuccaggaacaaug

SEQ ID NO: 48920 - RNA, 22 nt, Artificial Sequence
  RPE65 RNA guide
cccuucgcagagaagauggggc

SEQ ID NO: 48921 - RNA, 22 nt, Artificial Sequence
  RPE65 RNA guide
ccgcccacacaggaugaaaaua

SEQ ID NO: 48922 - RNA, 22 nt, Artificial Sequence
  RPE65 RNA guide
ccguaauuuccaggaacaaugg

SEQ ID NO: 48923 - RNA, 22 nt, Artificial Sequence
  RPE65 RNA guide
ccuaaacuuccuacugcuuuuc

SEQ ID NO: 48924 - RNA, 22 nt, Artificial Sequence
  RPE65 RNA guide
ccuaaggacacaaacagaaugg

SEQ ID NO: 48925 - RNA, 22 nt, Artificial Sequence
  RPE65 RNA guide
ccuacugcuuuuccaauuacau

SEQ ID NO: 48926 - RNA, 22 nt, Artificial Sequence
  RPE65 RNA guide
ccucccauuguuccuggaaauu

SEQ ID NO: 48927 - RNA, 22 nt, Artificial Sequence
  RPE65 RNA guide
ccucccgcccacacaggaugaa

SEQ ID NO: 48928 - RNA, 22 nt, Artificial Sequence
  RPE65 RNA guide
ccucucaggucacagaaucuuu

SEQ ID NO: 48929 - RNA, 22 nt, Artificial Sequence
  RPE65 RNA guide
ccugaaaacaaaagauucugug

SEQ ID NO: 48930 - RNA, 22 nt, Artificial Sequence
  RPE65 RNA guide
ccugagaggugaacuuaaaguu

SEQ ID NO: 48931 - RNA, 22 nt, Artificial Sequence
  RPE65 RNA guide
ccugccuguucuuuauuccaca

SEQ ID NO: 48932 - RNA, 22 nt, Artificial Sequence
  RPE65 RNA guide
ccugcuuaauggauuuguuuaa

SEQ ID NO: 48933 - RNA, 22 nt, Artificial Sequence
  RPE65 RNA guide
ccuggaaauuacgggguuuuua

SEQ ID NO: 48934 - RNA, 22 nt, Artificial Sequence
  RPE65 RNA guide
ccuggcucaauagcaguuucug

SEQ ID NO: 48935 - RNA, 22 nt, Artificial Sequence
  RPE65 RNA guide
ccuggggaaacuugagccccau

SEQ ID NO: 48936 - RNA, 22 nt, Artificial Sequence
  RPE65 RNA guide
ccugucaccauucuguuugugu

SEQ ID NO: 48937 - RNA, 22 nt, Artificial Sequence
  RPE65 RNA guide
ccugugcucauguuugacuuuu

SEQ ID NO: 48938 - RNA, 22 nt, Artificial Sequence
  RPE65 RNA guide
ccugugugggcgggaggaaaug

SEQ ID NO: 48939 - RNA, 22 nt, Artificial Sequence
  RPE65 RNA guide
ccuguucuuuauuccacaaccc

SEQ ID NO: 48940 - RNA, 22 nt, Artificial Sequence
  RPE65 RNA guide
ccuucgcagagaagauggggcu

SEQ ID NO: 48941 - RNA, 22 nt, Artificial Sequence
  RPE65 RNA guide
ccuugagauacuuucuguucug

SEQ ID NO: 48942 - RNA, 22 nt, Artificial Sequence
  RPE65 RNA guide
ccuuuuuaagcacaagugccug

SEQ ID NO: 48943 - RNA, 22 nt, Artificial Sequence
  RPE65 RNA guide
cgaagggagaaaaagacaugcg

SEQ ID NO: 48944 - RNA, 22 nt, Artificial Sequence
  RPE65 RNA guide
cgcagagaagauggggcucaag

SEQ ID NO: 48945 - RNA, 22 nt, Artificial Sequence
  RPE65 RNA guide
cgcaugucuuuuucucccuucg

SEQ ID NO: 48946 - RNA, 22 nt, Artificial Sequence
  RPE65 RNA guide
cgcccacacaggaugaaaauaa

SEQ ID NO: 48947 - RNA, 22 nt, Artificial Sequence
  RPE65 RNA guide
cgggaggaaauggcucugauac

SEQ ID NO: 48948 - RNA, 22 nt, Artificial Sequence
  RPE65 RNA guide
cgggguuuuuacagagcugcug

SEQ ID NO: 48949 - RNA, 22 nt, Artificial Sequence
  RPE65 RNA guide
cggguccaugaaccccaccuga

SEQ ID NO: 48950 - RNA, 22 nt, Artificial Sequence
  RPE65 RNA guide
cguaauuuccaggaacaauggg

SEQ ID NO: 48951 - RNA, 22 nt, Artificial Sequence
  RPE65 RNA guide
cguuuuucagacuagccaaauc

SEQ ID NO: 48952 - RNA, 22 nt, Artificial Sequence
  RPE65 RNA guide
cuaaaauuauuugucauugccu

SEQ ID NO: 48953 - RNA, 22 nt, Artificial Sequence
  RPE65 RNA guide
cuaaacuuccuacugcuuuucc

SEQ ID NO: 48954 - RNA, 22 nt, Artificial Sequence
  RPE65 RNA guide
cuaaggacacaaacagaauggu

SEQ ID NO: 48955 - RNA, 22 nt, Artificial Sequence
  RPE65 RNA guide
cuaaucggguccaugaacccca

SEQ ID NO: 48956 - RNA, 22 nt, Artificial Sequence
  RPE65 RNA guide
cuacugcuuuuccaauuacauu

SEQ ID NO: 48957 - RNA, 22 nt, Artificial Sequence
  RPE65 RNA guide
cuagccaaaucacuaagaagac

SEQ ID NO: 48958 - RNA, 22 nt, Artificial Sequence
  RPE65 RNA guide
cuagucugaaaaacgcaugucu

SEQ ID NO: 48959 - RNA, 22 nt, Artificial Sequence
  RPE65 RNA guide
cuauugagccagguguaucaga

SEQ ID NO: 48960 - RNA, 22 nt, Artificial Sequence
  RPE65 RNA guide
cucaaggcugcuguuacuuaaa

SEQ ID NO: 48961 - RNA, 22 nt, Artificial Sequence
  RPE65 RNA guide
cucaauagcaguuucuggguug

SEQ ID NO: 48962 - RNA, 22 nt, Artificial Sequence
  RPE65 RNA guide
cucaaucugaaucacaucuaaa

SEQ ID NO: 48963 - RNA, 22 nt, Artificial Sequence
  RPE65 RNA guide
cucaggucacagaaucuuuugu

SEQ ID NO: 48964 - RNA, 22 nt, Artificial Sequence
  RPE65 RNA guide
cucccauuguuccuggaaauua

SEQ ID NO: 48965 - RNA, 22 nt, Artificial Sequence
  RPE65 RNA guide
cucccgcccacacaggaugaaa

SEQ ID NO: 48966 - RNA, 22 nt, Artificial Sequence
  RPE65 RNA guide
cucccuucgcagagaagauggg

SEQ ID NO: 48967 - RNA, 22 nt, Artificial Sequence
  RPE65 RNA guide
cucuaaaauuauuugucauugc

SEQ ID NO: 48968 - RNA, 22 nt, Artificial Sequence
  RPE65 RNA guide
cucucaggucacagaaucuuuu

SEQ ID NO: 48969 - RNA, 22 nt, Artificial Sequence
  RPE65 RNA guide
cucucuaaaauuauuugucauu

SEQ ID NO: 48970 - RNA, 22 nt, Artificial Sequence
  RPE65 RNA guide
cucugauacaccuggcucaaua

SEQ ID NO: 48971 - RNA, 22 nt, Artificial Sequence
  RPE65 RNA guide
cucugcgaagggagaaaaagac

SEQ ID NO: 48972 - RNA, 22 nt, Artificial Sequence
  RPE65 RNA guide
cucuguaaaaaccccguaauuu

SEQ ID NO: 48973 - RNA, 22 nt, Artificial Sequence
  RPE65 RNA guide
cucuugcuguuuuagaugugau

SEQ ID NO: 48974 - RNA, 22 nt, Artificial Sequence
  RPE65 RNA guide
cugaaaaacgcaugucuuuuuc

SEQ ID NO: 48975 - RNA, 22 nt, Artificial Sequence
  RPE65 RNA guide
cugaaaacaaaagauucuguga

SEQ ID NO: 48976 - RNA, 22 nt, Artificial Sequence
  RPE65 RNA guide
cugaaucacaucuaaaacagca

SEQ ID NO: 48977 - RNA, 22 nt, Artificial Sequence
  RPE65 RNA guide
cugagaggugaacuuaaaguug

SEQ ID NO: 48978 - RNA, 22 nt, Artificial Sequence
  RPE65 RNA guide
cugauacaccuggcucaauagc

SEQ ID NO: 48979 - RNA, 22 nt, Artificial Sequence
  RPE65 RNA guide
cugcacucaaucugaaucacau

SEQ ID NO: 48980 - RNA, 22 nt, Artificial Sequence
  RPE65 RNA guide
cugccuguucuuuauuccacaa

SEQ ID NO: 48981 - RNA, 22 nt, Artificial Sequence
  RPE65 RNA guide
cugcgaagggagaaaaagacau

SEQ ID NO: 48982 - RNA, 22 nt, Artificial Sequence
  RPE65 RNA guide
cugcuauugagccagguguauc

SEQ ID NO: 48983 - RNA, 22 nt, Artificial Sequence
  RPE65 RNA guide
cugcugcacucaaucugaauca

SEQ ID NO: 48984 - RNA, 22 nt, Artificial Sequence
  RPE65 RNA guide
cugcuguuacuuaaacaaaucc

SEQ ID NO: 48985 - RNA, 22 nt, Artificial Sequence
  RPE65 RNA guide
cugcuuaauggauuuguuuaag

SEQ ID NO: 48986 - RNA, 22 nt, Artificial Sequence
  RPE65 RNA guide
cugcuuuuccaauuacauuuuu

SEQ ID NO: 48987 - RNA, 22 nt, Artificial Sequence
  RPE65 RNA guide
cuggaaauuacgggguuuuuac

SEQ ID NO: 48988 - RNA, 22 nt, Artificial Sequence
  RPE65 RNA guide
cuggacaaaugggacaccuccc

SEQ ID NO: 48989 - RNA, 22 nt, Artificial Sequence
  RPE65 RNA guide
cuggcucaauagcaguuucugg

SEQ ID NO: 48990 - RNA, 22 nt, Artificial Sequence
  RPE65 RNA guide
cuggggaaacuugagccccauc

SEQ ID NO: 48991 - RNA, 22 nt, Artificial Sequence
  RPE65 RNA guide
cuggguuguggaauaaagaaca

SEQ ID NO: 48992 - RNA, 22 nt, Artificial Sequence
  RPE65 RNA guide
cuguaaaaaccccguaauuucc

SEQ ID NO: 48993 - RNA, 22 nt, Artificial Sequence
  RPE65 RNA guide
cugucaccauucuguuuguguc

SEQ ID NO: 48994 - RNA, 22 nt, Artificial Sequence
  RPE65 RNA guide
cugucuuccugucaccauucug

SEQ ID NO: 48995 - RNA, 22 nt, Artificial Sequence
  RPE65 RNA guide
cugugaccugagaggugaacuu

SEQ ID NO: 48996 - RNA, 22 nt, Artificial Sequence
  RPE65 RNA guide
cugugcucauguuugacuuuuu

SEQ ID NO: 48997 - RNA, 22 nt, Artificial Sequence
  RPE65 RNA guide
cugugugggcgggaggaaaugg

SEQ ID NO: 48998 - RNA, 22 nt, Artificial Sequence
  RPE65 RNA guide
cuguuacuuaaacaaauccauu

SEQ ID NO: 48999 - RNA, 22 nt, Artificial Sequence
  RPE65 RNA guide
cuguucugucuuccugucacca

SEQ ID NO: 49000 - RNA, 22 nt, Artificial Sequence
  RPE65 RNA guide
cuguucuuuauuccacaaccca

SEQ ID NO: 49001 - RNA, 22 nt, Artificial Sequence
  RPE65 RNA guide
cuguugucuucuuagugauuug

SEQ ID NO: 49002 - RNA, 22 nt, Artificial Sequence
  RPE65 RNA guide
cuguuuuagaugugauucagau

SEQ ID NO: 49003 - RNA, 22 nt, Artificial Sequence
  RPE65 RNA guide
cuuaaaaaggcaagaaucaucu

SEQ ID NO: 49004 - RNA, 22 nt, Artificial Sequence
  RPE65 RNA guide
cuuaaacaaauccauuaagcag

SEQ ID NO: 49005 - RNA, 22 nt, Artificial Sequence
  RPE65 RNA guide
cuuaauggauuuguuuaaguaa

SEQ ID NO: 49006 - RNA, 22 nt, Artificial Sequence
  RPE65 RNA guide
cuuagugauuuggcuagucuga

SEQ ID NO: 49007 - RNA, 22 nt, Artificial Sequence
  RPE65 RNA guide
cuuccuacugcuuuuccaauua

SEQ ID NO: 49008 - RNA, 22 nt, Artificial Sequence
  RPE65 RNA guide
cuuccugucaccauucuguuug

SEQ ID NO: 49009 - RNA, 22 nt, Artificial Sequence
  RPE65 RNA guide
cuucgcagagaagauggggcuc

SEQ ID NO: 49010 - RNA, 22 nt, Artificial Sequence
  RPE65 RNA guide
cuucucugcgaagggagaaaaa

SEQ ID NO: 49011 - RNA, 22 nt, Artificial Sequence
  RPE65 RNA guide
cuucuuagugauuuggcuaguc

SEQ ID NO: 49012 - RNA, 22 nt, Artificial Sequence
  RPE65 RNA guide
cuugagauacuuucuguucugu

SEQ ID NO: 49013 - RNA, 22 nt, Artificial Sequence
  RPE65 RNA guide
cuugagccccaucuucucugcg

SEQ ID NO: 49014 - RNA, 22 nt, Artificial Sequence
  RPE65 RNA guide
cuugccuuuuuaagcacaagug

SEQ ID NO: 49015 - RNA, 22 nt, Artificial Sequence
  RPE65 RNA guide
cuugcuguuuuagaugugauuc

SEQ ID NO: 49016 - RNA, 22 nt, Artificial Sequence
  RPE65 RNA guide
cuugugcuuaaaaaggcaagaa

SEQ ID NO: 49017 - RNA, 22 nt, Artificial Sequence
  RPE65 RNA guide
cuuuaaguucaccucucagguc

SEQ ID NO: 49018 - RNA, 22 nt, Artificial Sequence
  RPE65 RNA guide
cuuuauuccacaacccagaaac

SEQ ID NO: 49019 - RNA, 22 nt, Artificial Sequence
  RPE65 RNA guide
cuuuauuuucauccuguguggg

SEQ ID NO: 49020 - RNA, 22 nt, Artificial Sequence
  RPE65 RNA guide
cuuucuguucugucuuccuguc

SEQ ID NO: 49021 - RNA, 22 nt, Artificial Sequence
  RPE65 RNA guide
cuuuuccaauuacauuuuugac

SEQ ID NO: 49022 - RNA, 22 nt, Artificial Sequence
  RPE65 RNA guide
cuuuuguuuucaggugggguuc

SEQ ID NO: 49023 - RNA, 22 nt, Artificial Sequence
  RPE65 RNA guide
cuuuuuaagcacaagugccugc

SEQ ID NO: 49024 - RNA, 22 nt, Artificial Sequence
  RPE65 RNA guide
cuuuuucucccuucgcagagaa

SEQ ID NO: 49025 - RNA, 22 nt, Artificial Sequence
  RPE65 RNA guide
gaaaaacgcaugucuuuuucuc

SEQ ID NO: 49026 - RNA, 22 nt, Artificial Sequence
  RPE65 RNA guide
gaaaaagacaugcguuuuucag

SEQ ID NO: 49027 - RNA, 22 nt, Artificial Sequence
  RPE65 RNA guide
gaaaacaaaagauucugugacc

SEQ ID NO: 49028 - RNA, 22 nt, Artificial Sequence
  RPE65 RNA guide
gaaaacuaaucggguccaugaa

SEQ ID NO: 49029 - RNA, 22 nt, Artificial Sequence
  RPE65 RNA guide
gaaaagcaguaggaaguuuagg

SEQ ID NO: 49030 - RNA, 22 nt, Artificial Sequence
  RPE65 RNA guide
gaaaauaaagcaaccugcuuaa

SEQ ID NO: 49031 - RNA, 22 nt, Artificial Sequence
  RPE65 RNA guide
gaaacugcuauugagccaggug

SEQ ID NO: 49032 - RNA, 22 nt, Artificial Sequence
  RPE65 RNA guide
gaaacuugagccccaucuucuc

SEQ ID NO: 49033 - RNA, 22 nt, Artificial Sequence
  RPE65 RNA guide
gaaaggacacuggacaaauggg

SEQ ID NO: 49034 - RNA, 22 nt, Artificial Sequence
  RPE65 RNA guide
gaaaguaucucaaggcugcugu

SEQ ID NO: 49035 - RNA, 22 nt, Artificial Sequence
  RPE65 RNA guide
gaaauggcucugauacaccugg

SEQ ID NO: 49036 - RNA, 22 nt, Artificial Sequence
  RPE65 RNA guide
gaaauuacgggguuuuuacaga

SEQ ID NO: 49037 - RNA, 22 nt, Artificial Sequence
  RPE65 RNA guide
gaacaaugggaggugucccauu

SEQ ID NO: 49038 - RNA, 22 nt, Artificial Sequence
  RPE65 RNA guide
gaacagaaaguaucucaaggcu

SEQ ID NO: 49039 - RNA, 22 nt, Artificial Sequence
  RPE65 RNA guide
gaacaggcaggcacuugugcuu

SEQ ID NO: 49040 - RNA, 22 nt, Artificial Sequence
  RPE65 RNA guide
gaaccccaccugaaaacaaaag

SEQ ID NO: 49041 - RNA, 22 nt, Artificial Sequence
  RPE65 RNA guide
gaagacagaacagaaaguaucu

SEQ ID NO: 49042 - RNA, 22 nt, Artificial Sequence
  RPE65 RNA guide
gaagggagaaaaagacaugcgu

SEQ ID NO: 49043 - RNA, 22 nt, Artificial Sequence
  RPE65 RNA guide
gaaguuuagguaaucugaacau

SEQ ID NO: 49044 - RNA, 22 nt, Artificial Sequence
  RPE65 RNA guide
gaauaaagaacaggcaggcacu

SEQ ID NO: 49045 - RNA, 22 nt, Artificial Sequence
  RPE65 RNA guide
gaaucacaucuaaaacagcaag

SEQ ID NO: 49046 - RNA, 22 nt, Artificial Sequence
  RPE65 RNA guide
gaaucuuuuguuuucagguggg

SEQ ID NO: 49047 - RNA, 22 nt, Artificial Sequence
  RPE65 RNA guide
gaauggugacaggaagacagaa

SEQ ID NO: 49048 - RNA, 22 nt, Artificial Sequence
  RPE65 RNA guide
gacaaaugggacaccucccauu

SEQ ID NO: 49049 - RNA, 22 nt, Artificial Sequence
  RPE65 RNA guide
gacacaaacagaauggugacag

SEQ ID NO: 49050 - RNA, 22 nt, Artificial Sequence
  RPE65 RNA guide
gacaccucccauuguuccugga

SEQ ID NO: 49051 - RNA, 22 nt, Artificial Sequence
  RPE65 RNA guide
gacacuggacaaaugggacacc

SEQ ID NO: 49052 - RNA, 22 nt, Artificial Sequence
  RPE65 RNA guide
gacagaacagaaaguaucucaa

SEQ ID NO: 49053 - RNA, 22 nt, Artificial Sequence
  RPE65 RNA guide
gacaggaagacagaacagaaag

SEQ ID NO: 49054 - RNA, 22 nt, Artificial Sequence
  RPE65 RNA guide
gacaugcguuuuucagacuagc

SEQ ID NO: 49055 - RNA, 22 nt, Artificial Sequence
  RPE65 RNA guide
gacccgauuaguuuucaaucau

SEQ ID NO: 49056 - RNA, 22 nt, Artificial Sequence
  RPE65 RNA guide
gaccugagaggugaacuuaaag

SEQ ID NO: 49057 - RNA, 22 nt, Artificial Sequence
  RPE65 RNA guide
gacuagccaaaucacuaagaag

SEQ ID NO: 49058 - RNA, 22 nt, Artificial Sequence
  RPE65 RNA guide
gagaaaaagacaugcguuuuuc

SEQ ID NO: 49059 - RNA, 22 nt, Artificial Sequence
  RPE65 RNA guide
gagaagauggggcucaaguuuc

SEQ ID NO: 49060 - RNA, 22 nt, Artificial Sequence
  RPE65 RNA guide
gagagaugauucuugccuuuuu

SEQ ID NO: 49061 - RNA, 22 nt, Artificial Sequence
  RPE65 RNA guide
gagaggugaacuuaaaguugac

SEQ ID NO: 49062 - RNA, 22 nt, Artificial Sequence
  RPE65 RNA guide
gagagucaaaaauguaauugga

SEQ ID NO: 49063 - RNA, 22 nt, Artificial Sequence
  RPE65 RNA guide
gagauacuuucuguucugucuu

SEQ ID NO: 49064 - RNA, 22 nt, Artificial Sequence
  RPE65 RNA guide
gagaugauucuugccuuuuuaa

SEQ ID NO: 49065 - RNA, 22 nt, Artificial Sequence
  RPE65 RNA guide
gagcacaggcaaugacaaauaa

SEQ ID NO: 49066 - RNA, 22 nt, Artificial Sequence
  RPE65 RNA guide
gagccagguguaucagagccau

SEQ ID NO: 49067 - RNA, 22 nt, Artificial Sequence
  RPE65 RNA guide
gagccauuuccucccgcccaca

SEQ ID NO: 49068 - RNA, 22 nt, Artificial Sequence
  RPE65 RNA guide
gagccccaucuucucugcgaag

SEQ ID NO: 49069 - RNA, 22 nt, Artificial Sequence
  RPE65 RNA guide
gagcugcugcacucaaucugaa

SEQ ID NO: 49070 - RNA, 22 nt, Artificial Sequence
  RPE65 RNA guide
gaggaaauggcucugauacacc

SEQ ID NO: 49071 - RNA, 22 nt, Artificial Sequence
  RPE65 RNA guide
gaggugaacuuaaaguugacaa

SEQ ID NO: 49072 - RNA, 22 nt, Artificial Sequence
  RPE65 RNA guide
gaggugucccauuuguccagug

SEQ ID NO: 49073 - RNA, 22 nt, Artificial Sequence
  RPE65 RNA guide
gagucaaaaauguaauuggaaa

SEQ ID NO: 49074 - RNA, 22 nt, Artificial Sequence
  RPE65 RNA guide
gagugcagcagcucuguaaaaa

SEQ ID NO: 49075 - RNA, 22 nt, Artificial Sequence
  RPE65 RNA guide
gauacaccuggcucaauagcag

SEQ ID NO: 49076 - RNA, 22 nt, Artificial Sequence
  RPE65 RNA guide
gauacuuucuguucugucuucc

SEQ ID NO: 49077 - RNA, 22 nt, Artificial Sequence
  RPE65 RNA guide
gaugaaaauaaagcaaccugcu

SEQ ID NO: 49078 - RNA, 22 nt, Artificial Sequence
  RPE65 RNA guide
gaugauucuugccuuuuuaagc

SEQ ID NO: 49079 - RNA, 22 nt, Artificial Sequence
  RPE65 RNA guide
gaugugauucagauugagugca

SEQ ID NO: 49080 - RNA, 22 nt, Artificial Sequence
  RPE65 RNA guide
gauguucagauuaccuaaacuu

SEQ ID NO: 49081 - RNA, 22 nt, Artificial Sequence
  RPE65 RNA guide
gauuaaugauugaaaacuaauc

SEQ ID NO: 49082 - RNA, 22 nt, Artificial Sequence
  RPE65 RNA guide
gauuaccuaaacuuccuacugc

SEQ ID NO: 49083 - RNA, 22 nt, Artificial Sequence
  RPE65 RNA guide
gauucagauugagugcagcagc

SEQ ID NO: 49084 - RNA, 22 nt, Artificial Sequence
  RPE65 RNA guide
gauucugugaccugagagguga

SEQ ID NO: 49085 - RNA, 22 nt, Artificial Sequence
  RPE65 RNA guide
gauucuugccuuuuuaagcaca

SEQ ID NO: 49086 - RNA, 22 nt, Artificial Sequence
  RPE65 RNA guide
gauugaaaacuaaucgggucca

SEQ ID NO: 49087 - RNA, 22 nt, Artificial Sequence
  RPE65 RNA guide
gauugagugcagcagcucugua

SEQ ID NO: 49088 - RNA, 22 nt, Artificial Sequence
  RPE65 RNA guide
gauuuggcuagucugaaaaacg

SEQ ID NO: 49089 - RNA, 22 nt, Artificial Sequence
  RPE65 RNA guide
gauuuguuuaaguaacagcagc

SEQ ID NO: 49090 - RNA, 22 nt, Artificial Sequence
  RPE65 RNA guide
gauuuugucaacuuuaaguuca

SEQ ID NO: 49091 - RNA, 22 nt, Artificial Sequence
  RPE65 RNA guide
gcaaaaauaaaaagucaaacau

SEQ ID NO: 49092 - RNA, 22 nt, Artificial Sequence
  RPE65 RNA guide
gcaaccugcuuaauggauuugu

SEQ ID NO: 49093 - RNA, 22 nt, Artificial Sequence
  RPE65 RNA guide
gcacaagugccugccuguucuu

SEQ ID NO: 49094 - RNA, 22 nt, Artificial Sequence
  RPE65 RNA guide
gcacaggcaaugacaaauaauu

SEQ ID NO: 49095 - RNA, 22 nt, Artificial Sequence
  RPE65 RNA guide
gcacucaaucugaaucacaucu

SEQ ID NO: 49096 - RNA, 22 nt, Artificial Sequence
  RPE65 RNA guide
gcacuugugcuuaaaaaggcaa

SEQ ID NO: 49097 - RNA, 22 nt, Artificial Sequence
  RPE65 RNA guide
gcagagaagauggggcucaagu

SEQ ID NO: 49098 - RNA, 22 nt, Artificial Sequence
  RPE65 RNA guide
gcagcagcucuguaaaaacccc

SEQ ID NO: 49099 - RNA, 22 nt, Artificial Sequence
  RPE65 RNA guide
gcagccuugagauacuuucugu

SEQ ID NO: 49100 - RNA, 22 nt, Artificial Sequence
  RPE65 RNA guide
gcagcucuguaaaaaccccgua

SEQ ID NO: 49101 - RNA, 22 nt, Artificial Sequence
  RPE65 RNA guide
gcaggcacuugugcuuaaaaag

SEQ ID NO: 49102 - RNA, 22 nt, Artificial Sequence
  RPE65 RNA guide
gcagguugcuuuauuuucaucc

SEQ ID NO: 49103 - RNA, 22 nt, Artificial Sequence
  RPE65 RNA guide
gcaguaggaaguuuagguaauc

SEQ ID NO: 49104 - RNA, 22 nt, Artificial Sequence
  RPE65 RNA guide
gcaguuucuggguuguggaaua

SEQ ID NO: 49105 - RNA, 22 nt, Artificial Sequence
  RPE65 RNA guide
gcaugucuuuuucucccuucgc

SEQ ID NO: 49106 - RNA, 22 nt, Artificial Sequence
  RPE65 RNA guide
gccagguguaucagagccauuu

SEQ ID NO: 49107 - RNA, 22 nt, Artificial Sequence
  RPE65 RNA guide
gccauuuccucccgcccacaca

SEQ ID NO: 49108 - RNA, 22 nt, Artificial Sequence
  RPE65 RNA guide
gcccacacaggaugaaaauaaa

SEQ ID NO: 49109 - RNA, 22 nt, Artificial Sequence
  RPE65 RNA guide
gccccaucuucucugcgaaggg

SEQ ID NO: 49110 - RNA, 22 nt, Artificial Sequence
  RPE65 RNA guide
gccugccuguucuuuauuccac

SEQ ID NO: 49111 - RNA, 22 nt, Artificial Sequence
  RPE65 RNA guide
gccugugcucauguuugacuuu

SEQ ID NO: 49112 - RNA, 22 nt, Artificial Sequence
  RPE65 RNA guide
gccuguucuuuauuccacaacc

SEQ ID NO: 49113 - RNA, 22 nt, Artificial Sequence
  RPE65 RNA guide
gccuugagauacuuucuguucu

SEQ ID NO: 49114 - RNA, 22 nt, Artificial Sequence
  RPE65 RNA guide
gccuuuuuaagcacaagugccu

SEQ ID NO: 49115 - RNA, 22 nt, Artificial Sequence
  RPE65 RNA guide
gcgaagggagaaaaagacaugc

SEQ ID NO: 49116 - RNA, 22 nt, Artificial Sequence
  RPE65 RNA guide
gcgggaggaaauggcucugaua

SEQ ID NO: 49117 - RNA, 22 nt, Artificial Sequence
  RPE65 RNA guide
gcguuuuucagacuagccaaau

SEQ ID NO: 49118 - RNA, 22 nt, Artificial Sequence
  RPE65 RNA guide
gcuagucugaaaaacgcauguc

SEQ ID NO: 49119 - RNA, 22 nt, Artificial Sequence
  RPE65 RNA guide
gcuauugagccagguguaucag

SEQ ID NO: 49120 - RNA, 22 nt, Artificial Sequence
  RPE65 RNA guide
gcucaauagcaguuucuggguu

SEQ ID NO: 49121 - RNA, 22 nt, Artificial Sequence
  RPE65 RNA guide
gcucauguuugacuuuuuauuu

SEQ ID NO: 49122 - RNA, 22 nt, Artificial Sequence
  RPE65 RNA guide
gcucugauacaccuggcucaau

SEQ ID NO: 49123 - RNA, 22 nt, Artificial Sequence
  RPE65 RNA guide
gcucuguaaaaaccccguaauu

SEQ ID NO: 49124 - RNA, 22 nt, Artificial Sequence
  RPE65 RNA guide
gcugcacucaaucugaaucaca

SEQ ID NO: 49125 - RNA, 22 nt, Artificial Sequence
  RPE65 RNA guide
gcugcugcacucaaucugaauc

SEQ ID NO: 49126 - RNA, 22 nt, Artificial Sequence
  RPE65 RNA guide
gcugcuguuacuuaaacaaauc

SEQ ID NO: 49127 - RNA, 22 nt, Artificial Sequence
  RPE65 RNA guide
gcuguuacuuaaacaaauccau

SEQ ID NO: 49128 - RNA, 22 nt, Artificial Sequence
  RPE65 RNA guide
gcuguugucuucuuagugauuu

SEQ ID NO: 49129 - RNA, 22 nt, Artificial Sequence
  RPE65 RNA guide
gcuguuuuagaugugauucaga

SEQ ID NO: 49130 - RNA, 22 nt, Artificial Sequence
  RPE65 RNA guide
gcuuaaaaaggcaagaaucauc

SEQ ID NO: 49131 - RNA, 22 nt, Artificial Sequence
  RPE65 RNA guide
gcuuaauggauuuguuuaagua

SEQ ID NO: 49132 - RNA, 22 nt, Artificial Sequence
  RPE65 RNA guide
gcuuuauuuucauccugugugg

SEQ ID NO: 49133 - RNA, 22 nt, Artificial Sequence
  RPE65 RNA guide
gcuuuuccaauuacauuuuuga

SEQ ID NO: 49134 - RNA, 22 nt, Artificial Sequence
  RPE65 RNA guide
ggaaaagcaguaggaaguuuag

SEQ ID NO: 49135 - RNA, 22 nt, Artificial Sequence
  RPE65 RNA guide
ggaaacuugagccccaucuucu

SEQ ID NO: 49136 - RNA, 22 nt, Artificial Sequence
  RPE65 RNA guide
ggaaauggcucugauacaccug

SEQ ID NO: 49137 - RNA, 22 nt, Artificial Sequence
  RPE65 RNA guide
ggaaauuacgggguuuuuacag

SEQ ID NO: 49138 - RNA, 22 nt, Artificial Sequence
  RPE65 RNA guide
ggaacaaugggaggugucccau

SEQ ID NO: 49139 - RNA, 22 nt, Artificial Sequence
  RPE65 RNA guide
ggaagacagaacagaaaguauc

SEQ ID NO: 49140 - RNA, 22 nt, Artificial Sequence
  RPE65 RNA guide
ggaaguuuagguaaucugaaca

SEQ ID NO: 49141 - RNA, 22 nt, Artificial Sequence
  RPE65 RNA guide
ggaauaaagaacaggcaggcac

SEQ ID NO: 49142 - RNA, 22 nt, Artificial Sequence
  RPE65 RNA guide
ggacaaaugggacaccucccau

SEQ ID NO: 49143 - RNA, 22 nt, Artificial Sequence
  RPE65 RNA guide
ggacacaaacagaauggugaca

SEQ ID NO: 49144 - RNA, 22 nt, Artificial Sequence
  RPE65 RNA guide
ggacaccucccauuguuccugg

SEQ ID NO: 49145 - RNA, 22 nt, Artificial Sequence
  RPE65 RNA guide
ggacacuggacaaaugggacac

SEQ ID NO: 49146 - RNA, 22 nt, Artificial Sequence
  RPE65 RNA guide
ggacccgauuaguuuucaauca

SEQ ID NO: 49147 - RNA, 22 nt, Artificial Sequence
  RPE65 RNA guide
ggagaaaaagacaugcguuuuu

SEQ ID NO: 49148 - RNA, 22 nt, Artificial Sequence
  RPE65 RNA guide
ggaggaaauggcucugauacac

SEQ ID NO: 49149 - RNA, 22 nt, Artificial Sequence
  RPE65 RNA guide
ggaggugucccauuuguccagu

SEQ ID NO: 49150 - RNA, 22 nt, Artificial Sequence
  RPE65 RNA guide
ggaugaaaauaaagcaaccugc

SEQ ID NO: 49151 - RNA, 22 nt, Artificial Sequence
  RPE65 RNA guide
ggauuuguuuaaguaacagcag

SEQ ID NO: 49152 - RNA, 22 nt, Artificial Sequence
  RPE65 RNA guide
ggauuuugucaacuuuaaguuc

SEQ ID NO: 49153 - RNA, 22 nt, Artificial Sequence
  RPE65 RNA guide
ggcaagaaucaucucucuaaaa

SEQ ID NO: 49154 - RNA, 22 nt, Artificial Sequence
  RPE65 RNA guide
ggcaaugacaaauaauuuuaga

SEQ ID NO: 49155 - RNA, 22 nt, Artificial Sequence
  RPE65 RNA guide
ggcacuugugcuuaaaaaggca

SEQ ID NO: 49156 - RNA, 22 nt, Artificial Sequence
  RPE65 RNA guide
ggcaggcacuugugcuuaaaaa

SEQ ID NO: 49157 - RNA, 22 nt, Artificial Sequence
  RPE65 RNA guide
ggcgggaggaaauggcucugau

SEQ ID NO: 49158 - RNA, 22 nt, Artificial Sequence
  RPE65 RNA guide
ggcuagucugaaaaacgcaugu

SEQ ID NO: 49159 - RNA, 22 nt, Artificial Sequence
  RPE65 RNA guide
ggcucaauagcaguuucugggu

SEQ ID NO: 49160 - RNA, 22 nt, Artificial Sequence
  RPE65 RNA guide
ggcucugauacaccuggcucaa

SEQ ID NO: 49161 - RNA, 22 nt, Artificial Sequence
  RPE65 RNA guide
ggcugcuguuacuuaaacaaau

SEQ ID NO: 49162 - RNA, 22 nt, Artificial Sequence
  RPE65 RNA guide
gggaaacuugagccccaucuuc

SEQ ID NO: 49163 - RNA, 22 nt, Artificial Sequence
  RPE65 RNA guide
gggacaccucccauuguuccug

SEQ ID NO: 49164 - RNA, 22 nt, Artificial Sequence
  RPE65 RNA guide
gggagaaaaagacaugcguuuu

SEQ ID NO: 49165 - RNA, 22 nt, Artificial Sequence
  RPE65 RNA guide
gggaggaaauggcucugauaca

SEQ ID NO: 49166 - RNA, 22 nt, Artificial Sequence
  RPE65 RNA guide
gggaggugucccauuuguccag

SEQ ID NO: 49167 - RNA, 22 nt, Artificial Sequence
  RPE65 RNA guide
gggcgggaggaaauggcucuga

SEQ ID NO: 49168 - RNA, 22 nt, Artificial Sequence
  RPE65 RNA guide
ggggaaacuugagccccaucuu

SEQ ID NO: 49169 - RNA, 22 nt, Artificial Sequence
  RPE65 RNA guide
gggguucauggacccgauuagu

SEQ ID NO: 49170 - RNA, 22 nt, Artificial Sequence
  RPE65 RNA guide
gggguuuuuacagagcugcugc

SEQ ID NO: 49171 - RNA, 22 nt, Artificial Sequence
  RPE65 RNA guide
ggguccaugaaccccaccugaa

SEQ ID NO: 49172 - RNA, 22 nt, Artificial Sequence
  RPE65 RNA guide
ggguucauggacccgauuaguu

SEQ ID NO: 49173 - RNA, 22 nt, Artificial Sequence
  RPE65 RNA guide
ggguuguggaauaaagaacagg

SEQ ID NO: 49174 - RNA, 22 nt, Artificial Sequence
  RPE65 RNA guide
ggguuuuuacagagcugcugca

SEQ ID NO: 49175 - RNA, 22 nt, Artificial Sequence
  RPE65 RNA guide
gguaaucugaacaucaaaacua

SEQ ID NO: 49176 - RNA, 22 nt, Artificial Sequence
  RPE65 RNA guide
ggucacagaaucuuuuguuuuc

SEQ ID NO: 49177 - RNA, 22 nt, Artificial Sequence
  RPE65 RNA guide
gguccaugaaccccaccugaaa

SEQ ID NO: 49178 - RNA, 22 nt, Artificial Sequence
  RPE65 RNA guide
ggugacaggaagacagaacaga

SEQ ID NO: 49179 - RNA, 22 nt, Artificial Sequence
  RPE65 RNA guide
ggugggguucauggacccgauu

SEQ ID NO: 49180 - RNA, 22 nt, Artificial Sequence
  RPE65 RNA guide
gguguaucagagccauuuccuc

SEQ ID NO: 49181 - RNA, 22 nt, Artificial Sequence
  RPE65 RNA guide
ggugucccauuuguccaguguc

SEQ ID NO: 49182 - RNA, 22 nt, Artificial Sequence
  RPE65 RNA guide
gguucauggacccgauuaguuu

SEQ ID NO: 49183 - RNA, 22 nt, Artificial Sequence
  RPE65 RNA guide
gguugcuuuauuuucauccugu

SEQ ID NO: 49184 - RNA, 22 nt, Artificial Sequence
  RPE65 RNA guide
gguuguggaauaaagaacaggc

SEQ ID NO: 49185 - RNA, 22 nt, Artificial Sequence
  RPE65 RNA guide
gguuuuuacagagcugcugcac

SEQ ID NO: 49186 - RNA, 22 nt, Artificial Sequence
  RPE65 RNA guide
guaaaaaccccguaauuuccag

SEQ ID NO: 49187 - RNA, 22 nt, Artificial Sequence
  RPE65 RNA guide
guaacagcagccuugagauacu

SEQ ID NO: 49188 - RNA, 22 nt, Artificial Sequence
  RPE65 RNA guide
guaagaaaggacacuggacaaa

SEQ ID NO: 49189 - RNA, 22 nt, Artificial Sequence
  RPE65 RNA guide
guaauuggaaaagcaguaggaa

SEQ ID NO: 49190 - RNA, 22 nt, Artificial Sequence
  RPE65 RNA guide
guaauuuccaggaacaauggga

SEQ ID NO: 49191 - RNA, 22 nt, Artificial Sequence
  RPE65 RNA guide
guaggaaguuuagguaaucuga

SEQ ID NO: 49192 - RNA, 22 nt, Artificial Sequence
  RPE65 RNA guide
guaucagagccauuuccucccg

SEQ ID NO: 49193 - RNA, 22 nt, Artificial Sequence
  RPE65 RNA guide
guaucucaaggcugcuguuacu

SEQ ID NO: 49194 - RNA, 22 nt, Artificial Sequence
  RPE65 RNA guide
gucaaaaauguaauuggaaaag

SEQ ID NO: 49195 - RNA, 22 nt, Artificial Sequence
  RPE65 RNA guide
gucaaacaugagcacaggcaau

SEQ ID NO: 49196 - RNA, 22 nt, Artificial Sequence
  RPE65 RNA guide
gucaacuuuaaguucaccucuc

SEQ ID NO: 49197 - RNA, 22 nt, Artificial Sequence
  RPE65 RNA guide
gucacagaaucuuuuguuuuca

SEQ ID NO: 49198 - RNA, 22 nt, Artificial Sequence
  RPE65 RNA guide
gucaccauucuguuuguguccu

SEQ ID NO: 49199 - RNA, 22 nt, Artificial Sequence
  RPE65 RNA guide
gucauugccugugcucauguuu

SEQ ID NO: 49200 - RNA, 22 nt, Artificial Sequence
  RPE65 RNA guide
guccaugaaccccaccugaaaa

SEQ ID NO: 49201 - RNA, 22 nt, Artificial Sequence
  RPE65 RNA guide
gucccauuuguccaguguccuu

SEQ ID NO: 49202 - RNA, 22 nt, Artificial Sequence
  RPE65 RNA guide
gucugaaaaacgcaugucuuuu

SEQ ID NO: 49203 - RNA, 22 nt, Artificial Sequence
  RPE65 RNA guide
gucuuccugucaccauucuguu

SEQ ID NO: 49204 - RNA, 22 nt, Artificial Sequence
  RPE65 RNA guide
gucuucuuagugauuuggcuag

SEQ ID NO: 49205 - RNA, 22 nt, Artificial Sequence
  RPE65 RNA guide
gucuuuuucucccuucgcagag

SEQ ID NO: 49206 - RNA, 22 nt, Artificial Sequence
  RPE65 RNA guide
gugaacuuaaaguugacaaaau

SEQ ID NO: 49207 - RNA, 22 nt, Artificial Sequence
  RPE65 RNA guide
gugacaggaagacagaacagaa

SEQ ID NO: 49208 - RNA, 22 nt, Artificial Sequence
  RPE65 RNA guide
gugaccugagaggugaacuuaa

SEQ ID NO: 49209 - RNA, 22 nt, Artificial Sequence
  RPE65 RNA guide
gugagagucaaaaauguaauug

SEQ ID NO: 49210 - RNA, 22 nt, Artificial Sequence
  RPE65 RNA guide
gugauucagauugagugcagca

SEQ ID NO: 49211 - RNA, 22 nt, Artificial Sequence
  RPE65 RNA guide
gugauuuggcuagucugaaaaa

SEQ ID NO: 49212 - RNA, 22 nt, Artificial Sequence
  RPE65 RNA guide
gugcagcagcucuguaaaaacc

SEQ ID NO: 49213 - RNA, 22 nt, Artificial Sequence
  RPE65 RNA guide
gugccugccuguucuuuauucc

SEQ ID NO: 49214 - RNA, 22 nt, Artificial Sequence
  RPE65 RNA guide
gugcuuaaaaaggcaagaauca

SEQ ID NO: 49215 - RNA, 22 nt, Artificial Sequence
  RPE65 RNA guide
guggaauaaagaacaggcaggc

SEQ ID NO: 49216 - RNA, 22 nt, Artificial Sequence
  RPE65 RNA guide
gugggcgggaggaaauggcucu

SEQ ID NO: 49217 - RNA, 22 nt, Artificial Sequence
  RPE65 RNA guide
gugggguucauggacccgauua

SEQ ID NO: 49218 - RNA, 22 nt, Artificial Sequence
  RPE65 RNA guide
guguaucagagccauuuccucc

SEQ ID NO: 49219 - RNA, 22 nt, Artificial Sequence
  RPE65 RNA guide
gugucccauuuguccagugucc

SEQ ID NO: 49220 - RNA, 22 nt, Artificial Sequence
  RPE65 RNA guide
gugugggcgggaggaaauggcu

SEQ ID NO: 49221 - RNA, 22 nt, Artificial Sequence
  RPE65 RNA guide
guuacuuaaacaaauccauuaa

SEQ ID NO: 49222 - RNA, 22 nt, Artificial Sequence
  RPE65 RNA guide
guucaccucucaggucacagaa

SEQ ID NO: 49223 - RNA, 22 nt, Artificial Sequence
  RPE65 RNA guide
guucagauuaccuaaacuuccu

SEQ ID NO: 49224 - RNA, 22 nt, Artificial Sequence
  RPE65 RNA guide
guucauggacccgauuaguuuu

SEQ ID NO: 49225 - RNA, 22 nt, Artificial Sequence
  RPE65 RNA guide
guuccuggaaauuacgggguuu

SEQ ID NO: 49226 - RNA, 22 nt, Artificial Sequence
  RPE65 RNA guide
guucugucuuccugucaccauu

SEQ ID NO: 49227 - RNA, 22 nt, Artificial Sequence
  RPE65 RNA guide
guucuuuauuccacaacccaga

SEQ ID NO: 49228 - RNA, 22 nt, Artificial Sequence
  RPE65 RNA guide
guugcuuuauuuucauccugug

SEQ ID NO: 49229 - RNA, 22 nt, Artificial Sequence
  RPE65 RNA guide
guugucuucuuagugauuuggc

SEQ ID NO: 49230 - RNA, 22 nt, Artificial Sequence
  RPE65 RNA guide
guuguggaauaaagaacaggca

SEQ ID NO: 49231 - RNA, 22 nt, Artificial Sequence
  RPE65 RNA guide
guuuaaguaacagcagccuuga

SEQ ID NO: 49232 - RNA, 22 nt, Artificial Sequence
  RPE65 RNA guide
guuuagguaaucugaacaucaa

SEQ ID NO: 49233 - RNA, 22 nt, Artificial Sequence
  RPE65 RNA guide
guuucuggguuguggaauaaag

SEQ ID NO: 49234 - RNA, 22 nt, Artificial Sequence
  RPE65 RNA guide
guuuuagaugugauucagauug

SEQ ID NO: 49235 - RNA, 22 nt, Artificial Sequence
  RPE65 RNA guide
guuuucaggugggguucaugga

SEQ ID NO: 49236 - RNA, 22 nt, Artificial Sequence
  RPE65 RNA guide
guuuugauguucagauuaccua

SEQ ID NO: 49237 - RNA, 22 nt, Artificial Sequence
  RPE65 RNA guide
guuuuuacagagcugcugcacu

SEQ ID NO: 49238 - RNA, 22 nt, Artificial Sequence
  RPE65 RNA guide
guuuuucagacuagccaaauca

SEQ ID NO: 49239 - RNA, 22 nt, Artificial Sequence
  RPE65 RNA guide
uaaaaaccccguaauuuccagg

SEQ ID NO: 49240 - RNA, 22 nt, Artificial Sequence
  RPE65 RNA guide
uaaaaaggcaagaaucaucucu

SEQ ID NO: 49241 - RNA, 22 nt, Artificial Sequence
  RPE65 RNA guide
uaaaaagucaaacaugagcaca

SEQ ID NO: 49242 - RNA, 22 nt, Artificial Sequence
  RPE65 RNA guide
uaaaauuauuugucauugccug

SEQ ID NO: 49243 - RNA, 22 nt, Artificial Sequence
  RPE65 RNA guide
uaaacaaauccauuaagcaggu

SEQ ID NO: 49244 - RNA, 22 nt, Artificial Sequence
  RPE65 RNA guide
uaaacuuccuacugcuuuucca

SEQ ID NO: 49245 - RNA, 22 nt, Artificial Sequence
  RPE65 RNA guide
uaaagaacaggcaggcacuugu

SEQ ID NO: 49246 - RNA, 22 nt, Artificial Sequence
  RPE65 RNA guide
uaaagcaaccugcuuaauggau

SEQ ID NO: 49247 - RNA, 22 nt, Artificial Sequence
  RPE65 RNA guide
uaacagcagccuugagauacuu

SEQ ID NO: 49248 - RNA, 22 nt, Artificial Sequence
  RPE65 RNA guide
uaacucuugcuguuuuagaugu

SEQ ID NO: 49249 - RNA, 22 nt, Artificial Sequence
  RPE65 RNA guide
uaagaaaggacacuggacaaau

SEQ ID NO: 49250 - RNA, 22 nt, Artificial Sequence
  RPE65 RNA guide
uaagcacaagugccugccuguu

SEQ ID NO: 49251 - RNA, 22 nt, Artificial Sequence
  RPE65 RNA guide
uaagcagguugcuuuauuuuca

SEQ ID NO: 49252 - RNA, 22 nt, Artificial Sequence
  RPE65 RNA guide
uaaggacacaaacagaauggug

SEQ ID NO: 49253 - RNA, 22 nt, Artificial Sequence
  RPE65 RNA guide
uaaguaacagcagccuugagau

SEQ ID NO: 49254 - RNA, 22 nt, Artificial Sequence
  RPE65 RNA guide
uaaguucaccucucaggucaca

SEQ ID NO: 49255 - RNA, 22 nt, Artificial Sequence
  RPE65 RNA guide
uaaucggguccaugaaccccac

SEQ ID NO: 49256 - RNA, 22 nt, Artificial Sequence
  RPE65 RNA guide
uaaugauugaaaacuaaucggg

SEQ ID NO: 49257 - RNA, 22 nt, Artificial Sequence
  RPE65 RNA guide
uaauggauuuguuuaaguaaca

SEQ ID NO: 49258 - RNA, 22 nt, Artificial Sequence
  RPE65 RNA guide
uaauuggaaaagcaguaggaag

SEQ ID NO: 49259 - RNA, 22 nt, Artificial Sequence
  RPE65 RNA guide
uaauuuccaggaacaaugggag

SEQ ID NO: 49260 - RNA, 22 nt, Artificial Sequence
  RPE65 RNA guide
uaauuuuagagagaugauucuu

SEQ ID NO: 49261 - RNA, 22 nt, Artificial Sequence
  RPE65 RNA guide
uacaccuggcucaauagcaguu

SEQ ID NO: 49262 - RNA, 22 nt, Artificial Sequence
  RPE65 RNA guide
uacagagcugcugcacucaauc

SEQ ID NO: 49263 - RNA, 22 nt, Artificial Sequence
  RPE65 RNA guide
uacauuuuugacucucacauaa

SEQ ID NO: 49264 - RNA, 22 nt, Artificial Sequence
  RPE65 RNA guide
uaccuaaacuuccuacugcuuu

SEQ ID NO: 49265 - RNA, 22 nt, Artificial Sequence
  RPE65 RNA guide
uacgggguuuuuacagagcugc

SEQ ID NO: 49266 - RNA, 22 nt, Artificial Sequence
  RPE65 RNA guide
uacuuaaacaaauccauuaagc

SEQ ID NO: 49267 - RNA, 22 nt, Artificial Sequence
  RPE65 RNA guide
uacuuucuguucugucuuccug

SEQ ID NO: 49268 - RNA, 22 nt, Artificial Sequence
  RPE65 RNA guide
uagagagaugauucuugccuuu

SEQ ID NO: 49269 - RNA, 22 nt, Artificial Sequence
  RPE65 RNA guide
uagaugugauucagauugagug

SEQ ID NO: 49270 - RNA, 22 nt, Artificial Sequence
  RPE65 RNA guide
uagcaguuucuggguuguggaa

SEQ ID NO: 49271 - RNA, 22 nt, Artificial Sequence
  RPE65 RNA guide
uagccaaaucacuaagaagaca

SEQ ID NO: 49272 - RNA, 22 nt, Artificial Sequence
  RPE65 RNA guide
uaggaaguuuagguaaucugaa

SEQ ID NO: 49273 - RNA, 22 nt, Artificial Sequence
  RPE65 RNA guide
uagguaaucugaacaucaaaac

SEQ ID NO: 49274 - RNA, 22 nt, Artificial Sequence
  RPE65 RNA guide
uagucugaaaaacgcaugucuu

SEQ ID NO: 49275 - RNA, 22 nt, Artificial Sequence
  RPE65 RNA guide
uagugauuuggcuagucugaaa

SEQ ID NO: 49276 - RNA, 22 nt, Artificial Sequence
  RPE65 RNA guide
uaucagagccauuuccucccgc

SEQ ID NO: 49277 - RNA, 22 nt, Artificial Sequence
  RPE65 RNA guide
uaucucaaggcugcuguuacuu

SEQ ID NO: 49278 - RNA, 22 nt, Artificial Sequence
  RPE65 RNA guide
uaugugagagucaaaaauguaa

SEQ ID NO: 49279 - RNA, 22 nt, Artificial Sequence
  RPE65 RNA guide
uauuccacaacccagaaacugc

SEQ ID NO: 49280 - RNA, 22 nt, Artificial Sequence
  RPE65 RNA guide
uauugagccagguguaucagag

SEQ ID NO: 49281 - RNA, 22 nt, Artificial Sequence
  RPE65 RNA guide
uauuugucauugccugugcuca

SEQ ID NO: 49282 - RNA, 22 nt, Artificial Sequence
  RPE65 RNA guide
uauuuucauccugugugggcgg

SEQ ID NO: 49283 - RNA, 22 nt, Artificial Sequence
  RPE65 RNA guide
ucaaacaugagcacaggcaaug

SEQ ID NO: 49284 - RNA, 22 nt, Artificial Sequence
  RPE65 RNA guide
ucaacuuuaaguucaccucuca

SEQ ID NO: 49285 - RNA, 22 nt, Artificial Sequence
  RPE65 RNA guide
ucaaggcugcuguuacuuaaac

SEQ ID NO: 49286 - RNA, 22 nt, Artificial Sequence
  RPE65 RNA guide
ucaauagcaguuucuggguugu

SEQ ID NO: 49287 - RNA, 22 nt, Artificial Sequence
  RPE65 RNA guide
ucaaucugaaucacaucuaaaa

SEQ ID NO: 49288 - RNA, 22 nt, Artificial Sequence
  RPE65 RNA guide
ucacagaaucuuuuguuuucag

SEQ ID NO: 49289 - RNA, 22 nt, Artificial Sequence
  RPE65 RNA guide
ucaccucucaggucacagaauc

SEQ ID NO: 49290 - RNA, 22 nt, Artificial Sequence
  RPE65 RNA guide
ucagacuagccaaaucacuaag

SEQ ID NO: 49291 - RNA, 22 nt, Artificial Sequence
  RPE65 RNA guide
ucagagccauuuccucccgccc

SEQ ID NO: 49292 - RNA, 22 nt, Artificial Sequence
  RPE65 RNA guide
ucagauuaccuaaacuuccuac

SEQ ID NO: 49293 - RNA, 22 nt, Artificial Sequence
  RPE65 RNA guide
ucagauugagugcagcagcucu

SEQ ID NO: 49294 - RNA, 22 nt, Artificial Sequence
  RPE65 RNA guide
ucaggucacagaaucuuuuguu

SEQ ID NO: 49295 - RNA, 22 nt, Artificial Sequence
  RPE65 RNA guide
ucaggugggguucauggacccg

SEQ ID NO: 49296 - RNA, 22 nt, Artificial Sequence
  RPE65 RNA guide
ucauaguuuugauguucagauu

SEQ ID NO: 49297 - RNA, 22 nt, Artificial Sequence
  RPE65 RNA guide
ucauccugugugggcgggagga

SEQ ID NO: 49298 - RNA, 22 nt, Artificial Sequence
  RPE65 RNA guide
ucauggacccgauuaguuuuca

SEQ ID NO: 49299 - RNA, 22 nt, Artificial Sequence
  RPE65 RNA guide
ucauugccugugcucauguuug

SEQ ID NO: 49300 - RNA, 22 nt, Artificial Sequence
  RPE65 RNA guide
uccacaacccagaaacugcuau

SEQ ID NO: 49301 - RNA, 22 nt, Artificial Sequence
  RPE65 RNA guide
uccaggaacaaugggagguguc

SEQ ID NO: 49302 - RNA, 22 nt, Artificial Sequence
  RPE65 RNA guide
uccaugaaccccaccugaaaac

SEQ ID NO: 49303 - RNA, 22 nt, Artificial Sequence
  RPE65 RNA guide
uccauuaagcagguugcuuuau

SEQ ID NO: 49304 - RNA, 22 nt, Artificial Sequence
  RPE65 RNA guide
ucccauuguuccuggaaauuac

SEQ ID NO: 49305 - RNA, 22 nt, Artificial Sequence
  RPE65 RNA guide
ucccauuuguccaguguccuuu

SEQ ID NO: 49306 - RNA, 22 nt, Artificial Sequence
  RPE65 RNA guide
ucccgcccacacaggaugaaaa

SEQ ID NO: 49307 - RNA, 22 nt, Artificial Sequence
  RPE65 RNA guide
ucccuucgcagagaagaugggg

SEQ ID NO: 49308 - RNA, 22 nt, Artificial Sequence
  RPE65 RNA guide
uccuacugcuuuuccaauuaca

SEQ ID NO: 49309 - RNA, 22 nt, Artificial Sequence
  RPE65 RNA guide
uccucccgcccacacaggauga

SEQ ID NO: 49310 - RNA, 22 nt, Artificial Sequence
  RPE65 RNA guide
uccuggaaauuacgggguuuuu

SEQ ID NO: 49311 - RNA, 22 nt, Artificial Sequence
  RPE65 RNA guide
uccugucaccauucuguuugug

SEQ ID NO: 49312 - RNA, 22 nt, Artificial Sequence
  RPE65 RNA guide
uccugugugggcgggaggaaau

SEQ ID NO: 49313 - RNA, 22 nt, Artificial Sequence
  RPE65 RNA guide
ucgcagagaagauggggcucaa

SEQ ID NO: 49314 - RNA, 22 nt, Artificial Sequence
  RPE65 RNA guide
ucggguccaugaaccccaccug

SEQ ID NO: 49315 - RNA, 22 nt, Artificial Sequence
  RPE65 RNA guide
ucuaaaauuauuugucauugcc

SEQ ID NO: 49316 - RNA, 22 nt, Artificial Sequence
  RPE65 RNA guide
ucucaaggcugcuguuacuuaa

SEQ ID NO: 49317 - RNA, 22 nt, Artificial Sequence
  RPE65 RNA guide
ucucaggucacagaaucuuuug

SEQ ID NO: 49318 - RNA, 22 nt, Artificial Sequence
  RPE65 RNA guide
ucucccuucgcagagaagaugg

SEQ ID NO: 49319 - RNA, 22 nt, Artificial Sequence
  RPE65 RNA guide
ucucuaaaauuauuugucauug

SEQ ID NO: 49320 - RNA, 22 nt, Artificial Sequence
  RPE65 RNA guide
ucucucuaaaauuauuugucau

SEQ ID NO: 49321 - RNA, 22 nt, Artificial Sequence
  RPE65 RNA guide
ucucugcgaagggagaaaaaga

SEQ ID NO: 49322 - RNA, 22 nt, Artificial Sequence
  RPE65 RNA guide
ucugaaaaacgcaugucuuuuu

SEQ ID NO: 49323 - RNA, 22 nt, Artificial Sequence
  RPE65 RNA guide
ucugaaucacaucuaaaacagc

SEQ ID NO: 49324 - RNA, 22 nt, Artificial Sequence
  RPE65 RNA guide
ucugauacaccuggcucaauag

SEQ ID NO: 49325 - RNA, 22 nt, Artificial Sequence
  RPE65 RNA guide
ucugcgaagggagaaaaagaca

SEQ ID NO: 49326 - RNA, 22 nt, Artificial Sequence
  RPE65 RNA guide
ucuggguuguggaauaaagaac

SEQ ID NO: 49327 - RNA, 22 nt, Artificial Sequence
  RPE65 RNA guide
ucuguaaaaaccccguaauuuc

SEQ ID NO: 49328 - RNA, 22 nt, Artificial Sequence
  RPE65 RNA guide
ucugucuuccugucaccauucu

SEQ ID NO: 49329 - RNA, 22 nt, Artificial Sequence
  RPE65 RNA guide
ucugugaccugagaggugaacu

SEQ ID NO: 49330 - RNA, 22 nt, Artificial Sequence
  RPE65 RNA guide
ucuguucugucuuccugucacc

SEQ ID NO: 49331 - RNA, 22 nt, Artificial Sequence
  RPE65 RNA guide
ucuuagugauuuggcuagucug

SEQ ID NO: 49332 - RNA, 22 nt, Artificial Sequence
  RPE65 RNA guide
ucuuccugucaccauucuguuu

SEQ ID NO: 49333 - RNA, 22 nt, Artificial Sequence
  RPE65 RNA guide
ucuucucugcgaagggagaaaa

SEQ ID NO: 49334 - RNA, 22 nt, Artificial Sequence
  RPE65 RNA guide
ucuucuuagugauuuggcuagu

SEQ ID NO: 49335 - RNA, 22 nt, Artificial Sequence
  RPE65 RNA guide
ucuugccuuuuuaagcacaagu

SEQ ID NO: 49336 - RNA, 22 nt, Artificial Sequence
  RPE65 RNA guide
ucuugcuguuuuagaugugauu

SEQ ID NO: 49337 - RNA, 22 nt, Artificial Sequence
  RPE65 RNA guide
ucuuuauuccacaacccagaaa

SEQ ID NO: 49338 - RNA, 22 nt, Artificial Sequence
  RPE65 RNA guide
ucuuuuguuuucaggugggguu

SEQ ID NO: 49339 - RNA, 22 nt, Artificial Sequence
  RPE65 RNA guide
ucuuuuucucccuucgcagaga

SEQ ID NO: 49340 - RNA, 22 nt, Artificial Sequence
  RPE65 RNA guide
ugaaaaacgcaugucuuuuucu

SEQ ID NO: 49341 - RNA, 22 nt, Artificial Sequence
  RPE65 RNA guide
ugaaaacaaaagauucugugac

SEQ ID NO: 49342 - RNA, 22 nt, Artificial Sequence
  RPE65 RNA guide
ugaaaacuaaucggguccauga

SEQ ID NO: 49343 - RNA, 22 nt, Artificial Sequence
  RPE65 RNA guide
ugaaaauaaagcaaccugcuua

SEQ ID NO: 49344 - RNA, 22 nt, Artificial Sequence
  RPE65 RNA guide
ugaaccccaccugaaaacaaaa

SEQ ID NO: 49345 - RNA, 22 nt, Artificial Sequence
  RPE65 RNA guide
ugaacuuaaaguugacaaaauc

SEQ ID NO: 49346 - RNA, 22 nt, Artificial Sequence
  RPE65 RNA guide
ugaaucacaucuaaaacagcaa

SEQ ID NO: 49347 - RNA, 22 nt, Artificial Sequence
  RPE65 RNA guide
ugacaggaagacagaacagaaa

SEQ ID NO: 49348 - RNA, 22 nt, Artificial Sequence
  RPE65 RNA guide
ugaccugagaggugaacuuaaa

SEQ ID NO: 49349 - RNA, 22 nt, Artificial Sequence
  RPE65 RNA guide
ugagaggugaacuuaaaguuga

SEQ ID NO: 49350 - RNA, 22 nt, Artificial Sequence
  RPE65 RNA guide
ugagauacuuucuguucugucu

SEQ ID NO: 49351 - RNA, 22 nt, Artificial Sequence
  RPE65 RNA guide
ugagcacaggcaaugacaaaua

SEQ ID NO: 49352 - RNA, 22 nt, Artificial Sequence
  RPE65 RNA guide
ugagccagguguaucagagcca

SEQ ID NO: 49353 - RNA, 22 nt, Artificial Sequence
  RPE65 RNA guide
ugagccccaucuucucugcgaa

SEQ ID NO: 49354 - RNA, 22 nt, Artificial Sequence
  RPE65 RNA guide
ugagugcagcagcucuguaaaa

SEQ ID NO: 49355 - RNA, 22 nt, Artificial Sequence
  RPE65 RNA guide
ugauacaccuggcucaauagca

SEQ ID NO: 49356 - RNA, 22 nt, Artificial Sequence
  RPE65 RNA guide
ugauguucagauuaccuaaacu

SEQ ID NO: 49357 - RNA, 22 nt, Artificial Sequence
  RPE65 RNA guide
ugauuaaugauugaaaacuaau

SEQ ID NO: 49358 - RNA, 22 nt, Artificial Sequence
  RPE65 RNA guide
ugauucagauugagugcagcag

SEQ ID NO: 49359 - RNA, 22 nt, Artificial Sequence
  RPE65 RNA guide
ugauucuugccuuuuuaagcac

SEQ ID NO: 49360 - RNA, 22 nt, Artificial Sequence
  RPE65 RNA guide
ugauugaaaacuaaucgggucc

SEQ ID NO: 49361 - RNA, 22 nt, Artificial Sequence
  RPE65 RNA guide
ugauuuggcuagucugaaaaac

SEQ ID NO: 49362 - RNA, 22 nt, Artificial Sequence
  RPE65 RNA guide
ugcacucaaucugaaucacauc

SEQ ID NO: 49363 - RNA, 22 nt, Artificial Sequence
  RPE65 RNA guide
ugcagcagcucuguaaaaaccc

SEQ ID NO: 49364 - RNA, 22 nt, Artificial Sequence
  RPE65 RNA guide
ugccugccuguucuuuauucca

SEQ ID NO: 49365 - RNA, 22 nt, Artificial Sequence
  RPE65 RNA guide
ugccugugcucauguuugacuu

SEQ ID NO: 49366 - RNA, 22 nt, Artificial Sequence
  RPE65 RNA guide
ugccuguucuuuauuccacaac

SEQ ID NO: 49367 - RNA, 22 nt, Artificial Sequence
  RPE65 RNA guide
ugccuuuuuaagcacaagugcc

SEQ ID NO: 49368 - RNA, 22 nt, Artificial Sequence
  RPE65 RNA guide
ugcgaagggagaaaaagacaug

SEQ ID NO: 49369 - RNA, 22 nt, Artificial Sequence
  RPE65 RNA guide
ugcguuuuucagacuagccaaa

SEQ ID NO: 49370 - RNA, 22 nt, Artificial Sequence
  RPE65 RNA guide
ugcuauugagccagguguauca

SEQ ID NO: 49371 - RNA, 22 nt, Artificial Sequence
  RPE65 RNA guide
ugcugcacucaaucugaaucac

SEQ ID NO: 49372 - RNA, 22 nt, Artificial Sequence
  RPE65 RNA guide
ugcuguugucuucuuagugauu

SEQ ID NO: 49373 - RNA, 22 nt, Artificial Sequence
  RPE65 RNA guide
ugcuguuuuagaugugauucag

SEQ ID NO: 49374 - RNA, 22 nt, Artificial Sequence
  RPE65 RNA guide
ugcuuaaaaaggcaagaaucau

SEQ ID NO: 49375 - RNA, 22 nt, Artificial Sequence
  RPE65 RNA guide
ugcuuuauuuucauccugugug

SEQ ID NO: 49376 - RNA, 22 nt, Artificial Sequence
  RPE65 RNA guide
ugcuuuuccaauuacauuuuug

SEQ ID NO: 49377 - RNA, 22 nt, Artificial Sequence
  RPE65 RNA guide
uggaaaagcaguaggaaguuua

SEQ ID NO: 49378 - RNA, 22 nt, Artificial Sequence
  RPE65 RNA guide
uggaaauuacgggguuuuuaca

SEQ ID NO: 49379 - RNA, 22 nt, Artificial Sequence
  RPE65 RNA guide
uggaauaaagaacaggcaggca

SEQ ID NO: 49380 - RNA, 22 nt, Artificial Sequence
  RPE65 RNA guide
uggacaaaugggacaccuccca

SEQ ID NO: 49381 - RNA, 22 nt, Artificial Sequence
  RPE65 RNA guide
uggacccgauuaguuuucaauc

SEQ ID NO: 49382 - RNA, 22 nt, Artificial Sequence
  RPE65 RNA guide
uggauuuguuuaaguaacagca

SEQ ID NO: 49383 - RNA, 22 nt, Artificial Sequence
  RPE65 RNA guide
uggcuagucugaaaaacgcaug

SEQ ID NO: 49384 - RNA, 22 nt, Artificial Sequence
  RPE65 RNA guide
uggcucaauagcaguuucuggg

SEQ ID NO: 49385 - RNA, 22 nt, Artificial Sequence
  RPE65 RNA guide
uggcucugauacaccuggcuca

SEQ ID NO: 49386 - RNA, 22 nt, Artificial Sequence
  RPE65 RNA guide
ugggacaccucccauuguuccu

SEQ ID NO: 49387 - RNA, 22 nt, Artificial Sequence
  RPE65 RNA guide
ugggaggugucccauuugucca

SEQ ID NO: 49388 - RNA, 22 nt, Artificial Sequence
  RPE65 RNA guide
ugggcgggaggaaauggcucug

SEQ ID NO: 49389 - RNA, 22 nt, Artificial Sequence
  RPE65 RNA guide
uggggaaacuugagccccaucu

SEQ ID NO: 49390 - RNA, 22 nt, Artificial Sequence
  RPE65 RNA guide
ugggguucauggacccgauuag

SEQ ID NO: 49391 - RNA, 22 nt, Artificial Sequence
  RPE65 RNA guide
uggguuguggaauaaagaacag

SEQ ID NO: 49392 - RNA, 22 nt, Artificial Sequence
  RPE65 RNA guide
uggugacaggaagacagaacag

SEQ ID NO: 49393 - RNA, 22 nt, Artificial Sequence
  RPE65 RNA guide
uguaaaaaccccguaauuucca

SEQ ID NO: 49394 - RNA, 22 nt, Artificial Sequence
  RPE65 RNA guide
uguaauuggaaaagcaguagga

SEQ ID NO: 49395 - RNA, 22 nt, Artificial Sequence
  RPE65 RNA guide
uguaucagagccauuuccuccc

SEQ ID NO: 49396 - RNA, 22 nt, Artificial Sequence
  RPE65 RNA guide
ugucaacuuuaaguucaccucu

SEQ ID NO: 49397 - RNA, 22 nt, Artificial Sequence
  RPE65 RNA guide
ugucaccauucuguuugugucc

SEQ ID NO: 49398 - RNA, 22 nt, Artificial Sequence
  RPE65 RNA guide
ugucauugccugugcucauguu

SEQ ID NO: 49399 - RNA, 22 nt, Artificial Sequence
  RPE65 RNA guide
ugucccauuuguccaguguccu

SEQ ID NO: 49400 - RNA, 22 nt, Artificial Sequence
  RPE65 RNA guide
ugucuuccugucaccauucugu

SEQ ID NO: 49401 - RNA, 22 nt, Artificial Sequence
  RPE65 RNA guide
ugucuucuuagugauuuggcua

SEQ ID NO: 49402 - RNA, 22 nt, Artificial Sequence
  RPE65 RNA guide
ugucuuuuucucccuucgcaga

SEQ ID NO: 49403 - RNA, 22 nt, Artificial Sequence
  RPE65 RNA guide
ugugaccugagaggugaacuua

SEQ ID NO: 49404 - RNA, 22 nt, Artificial Sequence
  RPE65 RNA guide
ugugagagucaaaaauguaauu

SEQ ID NO: 49405 - RNA, 22 nt, Artificial Sequence
  RPE65 RNA guide
ugugauucagauugagugcagc

SEQ ID NO: 49406 - RNA, 22 nt, Artificial Sequence
  RPE65 RNA guide
ugugcuuaaaaaggcaagaauc

SEQ ID NO: 49407 - RNA, 22 nt, Artificial Sequence
  RPE65 RNA guide
uguggaauaaagaacaggcagg

SEQ ID NO: 49408 - RNA, 22 nt, Artificial Sequence
  RPE65 RNA guide
ugugggcgggaggaaauggcuc

SEQ ID NO: 49409 - RNA, 22 nt, Artificial Sequence
  RPE65 RNA guide
ugugugggcgggaggaaauggc

SEQ ID NO: 49410 - RNA, 22 nt, Artificial Sequence
  RPE65 RNA guide
uguucagauuaccuaaacuucc

SEQ ID NO: 49411 - RNA, 22 nt, Artificial Sequence
  RPE65 RNA guide
uguuccuggaaauuacgggguu

SEQ ID NO: 49412 - RNA, 22 nt, Artificial Sequence
  RPE65 RNA guide
uguucugucuuccugucaccau

SEQ ID NO: 49413 - RNA, 22 nt, Artificial Sequence
  RPE65 RNA guide
uguucuuuauuccacaacccag

SEQ ID NO: 49414 - RNA, 22 nt, Artificial Sequence
  RPE65 RNA guide
uguugucuucuuagugauuugg

SEQ ID NO: 49415 - RNA, 22 nt, Artificial Sequence
  RPE65 RNA guide
uguuuaaguaacagcagccuug

SEQ ID NO: 49416 - RNA, 22 nt, Artificial Sequence
  RPE65 RNA guide
uguuuuagaugugauucagauu

SEQ ID NO: 49417 - RNA, 22 nt, Artificial Sequence
  RPE65 RNA guide
uguuuucaggugggguucaugg

SEQ ID NO: 49418 - RNA, 22 nt, Artificial Sequence
  RPE65 RNA guide
uuaaaaaggcaagaaucaucuc

SEQ ID NO: 49419 - RNA, 22 nt, Artificial Sequence
  RPE65 RNA guide
uuaaacaaauccauuaagcagg

SEQ ID NO: 49420 - RNA, 22 nt, Artificial Sequence
  RPE65 RNA guide
uuaagcacaagugccugccugu

SEQ ID NO: 49421 - RNA, 22 nt, Artificial Sequence
  RPE65 RNA guide
uuaagcagguugcuuuauuuuc

SEQ ID NO: 49422 - RNA, 22 nt, Artificial Sequence
  RPE65 RNA guide
uuaaguaacagcagccuugaga

SEQ ID NO: 49423 - RNA, 22 nt, Artificial Sequence
  RPE65 RNA guide
uuaaguucaccucucaggucac

SEQ ID NO: 49424 - RNA, 22 nt, Artificial Sequence
  RPE65 RNA guide
uuaaugauugaaaacuaaucgg

SEQ ID NO: 49425 - RNA, 22 nt, Artificial Sequence
  RPE65 RNA guide
uuacagagcugcugcacucaau

SEQ ID NO: 49426 - RNA, 22 nt, Artificial Sequence
  RPE65 RNA guide
uuacauuuuugacucucacaua

SEQ ID NO: 49427 - RNA, 22 nt, Artificial Sequence
  RPE65 RNA guide
uuaccuaaacuuccuacugcuu

SEQ ID NO: 49428 - RNA, 22 nt, Artificial Sequence
  RPE65 RNA guide
uuacgggguuuuuacagagcug

SEQ ID NO: 49429 - RNA, 22 nt, Artificial Sequence
  RPE65 RNA guide
uuacuuaaacaaauccauuaag

SEQ ID NO: 49430 - RNA, 22 nt, Artificial Sequence
  RPE65 RNA guide
uuagagagaugauucuugccuu

SEQ ID NO: 49431 - RNA, 22 nt, Artificial Sequence
  RPE65 RNA guide
uuagaugugauucagauugagu

SEQ ID NO: 49432 - RNA, 22 nt, Artificial Sequence
  RPE65 RNA guide
uuagugauuuggcuagucugaa

SEQ ID NO: 49433 - RNA, 22 nt, Artificial Sequence
  RPE65 RNA guide
uuauuccacaacccagaaacug

SEQ ID NO: 49434 - RNA, 22 nt, Artificial Sequence
  RPE65 RNA guide
uuauuugucauugccugugcuc

SEQ ID NO: 49435 - RNA, 22 nt, Artificial Sequence
  RPE65 RNA guide
uuauuuucauccugugugggcg

SEQ ID NO: 49436 - RNA, 22 nt, Artificial Sequence
  RPE65 RNA guide
uucaccucucaggucacagaau

SEQ ID NO: 49437 - RNA, 22 nt, Artificial Sequence
  RPE65 RNA guide
uucagacuagccaaaucacuaa

SEQ ID NO: 49438 - RNA, 22 nt, Artificial Sequence
  RPE65 RNA guide
uucagauuaccuaaacuuccua

SEQ ID NO: 49439 - RNA, 22 nt, Artificial Sequence
  RPE65 RNA guide
uucagauugagugcagcagcuc

SEQ ID NO: 49440 - RNA, 22 nt, Artificial Sequence
  RPE65 RNA guide
uucaggugggguucauggaccc

SEQ ID NO: 49441 - RNA, 22 nt, Artificial Sequence
  RPE65 RNA guide
uucauccugugugggcgggagg

SEQ ID NO: 49442 - RNA, 22 nt, Artificial Sequence
  RPE65 RNA guide
uucauggacccgauuaguuuuc

SEQ ID NO: 49443 - RNA, 22 nt, Artificial Sequence
  RPE65 RNA guide
uuccaauuacauuuuugacucu

SEQ ID NO: 49444 - RNA, 22 nt, Artificial Sequence
  RPE65 RNA guide
uuccacaacccagaaacugcua

SEQ ID NO: 49445 - RNA, 22 nt, Artificial Sequence
  RPE65 RNA guide
uuccaggaacaaugggaggugu

SEQ ID NO: 49446 - RNA, 22 nt, Artificial Sequence
  RPE65 RNA guide
uuccuacugcuuuuccaauuac

SEQ ID NO: 49447 - RNA, 22 nt, Artificial Sequence
  RPE65 RNA guide
uuccucccgcccacacaggaug

SEQ ID NO: 49448 - RNA, 22 nt, Artificial Sequence
  RPE65 RNA guide
uuccuggaaauuacgggguuuu

SEQ ID NO: 49449 - RNA, 22 nt, Artificial Sequence
  RPE65 RNA guide
uuccugucaccauucuguuugu

SEQ ID NO: 49450 - RNA, 22 nt, Artificial Sequence
  RPE65 RNA guide
uucgcagagaagauggggcuca

SEQ ID NO: 49451 - RNA, 22 nt, Artificial Sequence
  RPE65 RNA guide
uucucccuucgcagagaagaug

SEQ ID NO: 49452 - RNA, 22 nt, Artificial Sequence
  RPE65 RNA guide
uucucugcgaagggagaaaaag

SEQ ID NO: 49453 - RNA, 22 nt, Artificial Sequence
  RPE65 RNA guide
uucuggguuguggaauaaagaa

SEQ ID NO: 49454 - RNA, 22 nt, Artificial Sequence
  RPE65 RNA guide
uucugucuuccugucaccauuc

SEQ ID NO: 49455 - RNA, 22 nt, Artificial Sequence
  RPE65 RNA guide
uucugugaccugagaggugaac

SEQ ID NO: 49456 - RNA, 22 nt, Artificial Sequence
  RPE65 RNA guide
uucuguucugucuuccugucac

SEQ ID NO: 49457 - RNA, 22 nt, Artificial Sequence
  RPE65 RNA guide
uucuuagugauuuggcuagucu

SEQ ID NO: 49458 - RNA, 22 nt, Artificial Sequence
  RPE65 RNA guide
uucuugccuuuuuaagcacaag

SEQ ID NO: 49459 - RNA, 22 nt, Artificial Sequence
  RPE65 RNA guide
uucuuuauuccacaacccagaa

SEQ ID NO: 49460 - RNA, 22 nt, Artificial Sequence
  RPE65 RNA guide
uugaaaacuaaucggguccaug

SEQ ID NO: 49461 - RNA, 22 nt, Artificial Sequence
  RPE65 RNA guide
uugagauacuuucuguucuguc

SEQ ID NO: 49462 - RNA, 22 nt, Artificial Sequence
  RPE65 RNA guide
uugagccagguguaucagagcc

SEQ ID NO: 49463 - RNA, 22 nt, Artificial Sequence
  RPE65 RNA guide
uugagccccaucuucucugcga

SEQ ID NO: 49464 - RNA, 22 nt, Artificial Sequence
  RPE65 RNA guide
uugagugcagcagcucuguaaa

SEQ ID NO: 49465 - RNA, 22 nt, Artificial Sequence
  RPE65 RNA guide
uugauguucagauuaccuaaac

SEQ ID NO: 49466 - RNA, 22 nt, Artificial Sequence
  RPE65 RNA guide
uugccugugcucauguuugacu

SEQ ID NO: 49467 - RNA, 22 nt, Artificial Sequence
  RPE65 RNA guide
uugccuuuuuaagcacaagugc

SEQ ID NO: 49468 - RNA, 22 nt, Artificial Sequence
  RPE65 RNA guide
uugcuguuuuagaugugauuca

SEQ ID NO: 49469 - RNA, 22 nt, Artificial Sequence
  RPE65 RNA guide
uugcuuuauuuucauccugugu

SEQ ID NO: 49470 - RNA, 22 nt, Artificial Sequence
  RPE65 RNA guide
uuggaaaagcaguaggaaguuu

SEQ ID NO: 49471 - RNA, 22 nt, Artificial Sequence
  RPE65 RNA guide
uuggcuagucugaaaaacgcau

SEQ ID NO: 49472 - RNA, 22 nt, Artificial Sequence
  RPE65 RNA guide
uugucaacuuuaaguucaccuc

SEQ ID NO: 49473 - RNA, 22 nt, Artificial Sequence
  RPE65 RNA guide
uugucauugccugugcucaugu

SEQ ID NO: 49474 - RNA, 22 nt, Artificial Sequence
  RPE65 RNA guide
uugucuucuuagugauuuggcu

SEQ ID NO: 49475 - RNA, 22 nt, Artificial Sequence
  RPE65 RNA guide
uugugcuuaaaaaggcaagaau

SEQ ID NO: 49476 - RNA, 22 nt, Artificial Sequence
  RPE65 RNA guide
uuguggaauaaagaacaggcag

SEQ ID NO: 49477 - RNA, 22 nt, Artificial Sequence
  RPE65 RNA guide
uuguuccuggaaauuacggggu

SEQ ID NO: 49478 - RNA, 22 nt, Artificial Sequence
  RPE65 RNA guide
uuguuuaaguaacagcagccuu

SEQ ID NO: 49479 - RNA, 22 nt, Artificial Sequence
  RPE65 RNA guide
uuguuuucaggugggguucaug

SEQ ID NO: 49480 - RNA, 22 nt, Artificial Sequence
  RPE65 RNA guide
uuuaagcacaagugccugccug

SEQ ID NO: 49481 - RNA, 22 nt, Artificial Sequence
  RPE65 RNA guide
uuuaaguaacagcagccuugag

SEQ ID NO: 49482 - RNA, 22 nt, Artificial Sequence
  RPE65 RNA guide
uuuaaguucaccucucagguca

SEQ ID NO: 49483 - RNA, 22 nt, Artificial Sequence
  RPE65 RNA guide
uuuacagagcugcugcacucaa

SEQ ID NO: 49484 - RNA, 22 nt, Artificial Sequence
  RPE65 RNA guide
uuuagagagaugauucuugccu

SEQ ID NO: 49485 - RNA, 22 nt, Artificial Sequence
  RPE65 RNA guide
uuuagaugugauucagauugag

SEQ ID NO: 49486 - RNA, 22 nt, Artificial Sequence
  RPE65 RNA guide
uuuauuccacaacccagaaacu

SEQ ID NO: 49487 - RNA, 22 nt, Artificial Sequence
  RPE65 RNA guide
uuuauuuucauccugugugggc

SEQ ID NO: 49488 - RNA, 22 nt, Artificial Sequence
  RPE65 RNA guide
uuucagacuagccaaaucacua

SEQ ID NO: 49489 - RNA, 22 nt, Artificial Sequence
  RPE65 RNA guide
uuucaggugggguucauggacc

SEQ ID NO: 49490 - RNA, 22 nt, Artificial Sequence
  RPE65 RNA guide
uuucauccugugugggcgggag

SEQ ID NO: 49491 - RNA, 22 nt, Artificial Sequence
  RPE65 RNA guide
uuuccaauuacauuuuugacuc

SEQ ID NO: 49492 - RNA, 22 nt, Artificial Sequence
  RPE65 RNA guide
uuuccaggaacaaugggaggug

SEQ ID NO: 49493 - RNA, 22 nt, Artificial Sequence
  RPE65 RNA guide
uuuccucccgcccacacaggau

SEQ ID NO: 49494 - RNA, 22 nt, Artificial Sequence
  RPE65 RNA guide
uuucucccuucgcagagaagau

SEQ ID NO: 49495 - RNA, 22 nt, Artificial Sequence
  RPE65 RNA guide
uuucuggguuguggaauaaaga

SEQ ID NO: 49496 - RNA, 22 nt, Artificial Sequence
  RPE65 RNA guide
uuucuguucugucuuccuguca

SEQ ID NO: 49497 - RNA, 22 nt, Artificial Sequence
  RPE65 RNA guide
uuugauguucagauuaccuaaa

SEQ ID NO: 49498 - RNA, 22 nt, Artificial Sequence
  RPE65 RNA guide
uuuggcuagucugaaaaacgca

SEQ ID NO: 49499 - RNA, 22 nt, Artificial Sequence
  RPE65 RNA guide
uuugucaacuuuaaguucaccu

SEQ ID NO: 49500 - RNA, 22 nt, Artificial Sequence
  RPE65 RNA guide
uuugucauugccugugcucaug

SEQ ID NO: 49501 - RNA, 22 nt, Artificial Sequence
  RPE65 RNA guide
uuuguuuaaguaacagcagccu

SEQ ID NO: 49502 - RNA, 22 nt, Artificial Sequence
  RPE65 RNA guide
uuuguuuucaggugggguucau

SEQ ID NO: 49503 - RNA, 22 nt, Artificial Sequence
  RPE65 RNA guide
uuuuaagcacaagugccugccu

SEQ ID NO: 49504 - RNA, 22 nt, Artificial Sequence
  RPE65 RNA guide
uuuuacagagcugcugcacuca

SEQ ID NO: 49505 - RNA, 22 nt, Artificial Sequence
  RPE65 RNA guide
uuuuagagagaugauucuugcc

SEQ ID NO: 49506 - RNA, 22 nt, Artificial Sequence
  RPE65 RNA guide
uuuuagaugugauucagauuga

SEQ ID NO: 49507 - RNA, 22 nt, Artificial Sequence
  RPE65 RNA guide
uuuucagacuagccaaaucacu

SEQ ID NO: 49508 - RNA, 22 nt, Artificial Sequence
  RPE65 RNA guide
uuuucaggugggguucauggac

SEQ ID NO: 49509 - RNA, 22 nt, Artificial Sequence
  RPE65 RNA guide
uuuucauccugugugggcggga

SEQ ID NO: 49510 - RNA, 22 nt, Artificial Sequence
  RPE65 RNA guide
uuuucucccuucgcagagaaga

SEQ ID NO: 49511 - RNA, 22 nt, Artificial Sequence
  RPE65 RNA guide
uuuugucaacuuuaaguucacc

SEQ ID NO: 49512 - RNA, 22 nt, Artificial Sequence
  RPE65 RNA guide
uuuuguuuucaggugggguuca

SEQ ID NO: 49513 - RNA, 22 nt, Artificial Sequence
  RPE65 RNA guide
uuuuuaagcacaagugccugcc

SEQ ID NO: 49514 - RNA, 22 nt, Artificial Sequence
  RPE65 RNA guide
uuuuuacagagcugcugcacuc

SEQ ID NO: 49515 - RNA, 22 nt, Artificial Sequence
  RPE65 RNA guide
uuuuucagacuagccaaaucac

SEQ ID NO: 49516 - RNA, 22 nt, Artificial Sequence
  RPE65 RNA guide
uuuuucucccuucgcagagaag

SEQ ID NO: 49517 - RNA, 20 nt, Artificial Sequence
  Example RNA Guide
aaaaaaauguacuugguucc

SEQ ID NO: 49518 - RNA, 17 nt, Artificial Sequence
  17 nucleotide guide sequence 1
aaaauguacuugguucc

SEQ ID NO: 49519 - RNA, 17 nt, Artificial Sequence
  17 nucleotide guide sequence 2
aaaaauguacuugguuc

SEQ ID NO: 49520 - RNA, 17 nt, Artificial Sequence
  17 nucleotide guide sequence 3
aaaaaauguacuugguu

SEQ ID NO: 49521 - RNA, 17 nt, Artificial Sequence
  17 nucleotide guide sequence 4
aaaaaaauguacuuggu
